(19) United States
(12) Patent Application Publication
(10) Pub. No.: US 2010/0151109 A1
(43) Pub. Date: Jun. 17, 2010

(54) MODULATION OF PLANT PROTEIN LEVELS

(76) Inventors: Amr Saad Ragab, Blacksburg, VA (US); Steven Craig Bobzin, Malibu, CA (US); Daniel Mumenthaler, Bonita, CA (US); Joel Cruz Rarang, Granada Hills, CA (US)

Correspondence Address: FISH & RICHARDSON P.C., P.O. BOX 1022, MINNEAPOLIS, MN, 55440-1022, US

(21) Appl. No.: 12/519,106

(22) PCT Filed: Dec. 14, 2007
(86) PCT No.: PCT/US07/87638

§ 371 Date: Feb. 26, 2010

Related U.S. Application Data
(60) Provisional application No. 60/870,232, filed on Dec. 15, 2006.

(51) Int. Cl. A23L 1/212; C12N 5/10; A01H 5/00; C12N 15/29; A23K 1/14

(52) U.S. Cl. 426/630; 435/419; 800/298; 536/23.6; 426/635; 426/615

(57) ABSTRACT

Methods and materials for modulating, e.g., increasing or decreasing, protein levels in plants are disclosed. For example, nucleic acids encoding protein-modulating polypeptides are disclosed as well as methods for using such nucleic acids to transform plant cells. Also disclosed are plants having increased protein levels and plant products produced from plants having increased protein levels.

### CROSS-REFERENCE TO RELATED APPLICATION

[0001] This application claims priority to U.S. Patent Application No. 60/870,232, filed on Dec. 15, 2006, and entitled “MODULATION OF PLANT PROTEIN LEVELS,” the entire contents of which are incorporated herein by reference.

### TECHNICAL FIELD

[0002] This document relates to methods and materials involved in modulating (e.g., increasing or decreasing) protein levels in plants. For example, this document provides plants having increased protein levels as well as materials and methods for making plants and plant products having increased protein levels.

### BACKGROUND

[0003] Protein is an important nutrient required for growth, maintenance, and repair of tissues. The building blocks of proteins are 20 amino acids that may be consumed from both plant and animal sources. Most microorganisms such as E. coli can synthesize the entire set of 20 amino acids, whereas human beings cannot make nine of them. The amino acids that must be supplied in the diet are called essential amino acids, whereas those that can be synthesized endogenously are termed nonessential amino acids. These designations refer to the needs of an organism under a particular set of conditions. For example, enough arginine is synthesized by the urea cycle to meet the needs of an adult, but perhaps not those of a growing child. A deficiency of even one amino acid results in a negative nitrogen balance. In this state, more protein is degraded than is synthesized, and so more nitrogen is excreted than is ingested.

[0004] According to U.S. government standards, the Recommended Daily Allowance (RDA) of protein is 0.8 gram per kilogram of ideal body weight for the adult human. The biological value of a dietary protein is determined by the amount and proportion of essential amino acids it provides. If the protein in a food supplies all of the essential amino acids, it is called a complete protein. If the protein in a food does not supply all of the essential amino acids, it is designated as an incomplete protein. Meat and other animal products are sources of complete proteins. However, a diet high in meat can lead to high cholesterol or other diseases, such as gout. Some plant sources of protein are considered to be partially complete because, although consumed alone they may not meet the requirements for essential amino acids, they can be combined to provide amounts and proportions of essential amino acids equivalent to those in proteins from animal sources. Soy protein is an exception because it is a complete protein. Soy protein products can be good substitutes for animal products because soybeans contain all of the amino acids essential to human nutrition and they have less fat, especially saturated fat, than animal-based foods. The U.S. Food and Drug Administration (FDA) determined that diets including four daily soy servings can reduce levels of low-density lipoproteins (LDLs), the cholesterol that builds up in blood vessels, by as much as 10 percent (Henkel, FDA Consumer, 34:3 (2000); fda.gov/fdac/features/2000/300_soy.html). FDA allows a health claim on food labels stating that a daily diet containing 25 grams of soy protein, that is also low in saturated fat and cholesterol, may reduce the risk of heart disease (Henkel, FDA Consumer, 34:3 (2000); fda.gov/fdac/features/2000/300_soy.html).

[0005] There is a need for methods of increasing protein production in plants, which provide healthier and more economical sources of protein than animal products.

### SUMMARY

[0006] This document provides methods and materials related to plants having modulated (e.g., increased or decreased) levels of protein. For example, this document provides transgenic plants and plant cells having increased levels of protein, nucleic acids used to generate transgenic plants and plant cells having increased levels of protein, and methods for making plants and plant cells having increased levels of protein. Such plants and plant cells can be grown to produce, for example, seeds having increased protein content. Seeds having increased protein levels may be useful to produce foodstuffs and animal feed having increased protein content, which may benefit both food producers and consumers.

[0007] In one aspect, a method of modulating the level of protein in a plant is provided. The method comprises introducing into a plant cell an exogenous nucleic acid comprising a nucleotide sequence encoding a polypeptide having 80 percent or greater sequence identity to an amino acid sequence selected from the group consisting of SEQ ID NOs:96-98, SEQ ID NO:100, SEQ ID NOs:102-103, SEQ ID NOs:106-110, SEQ ID NO:112, SEQ ID NO:114, SEQ ID NO:116, SEQ ID NOs:118-119, SEQ ID NO:122, SEQ ID NOs:125-126, SEQ ID NO:128, SEQ ID NO:131, SEQ ID NOs:133-134, SEQ ID NO:136, SEQ ID NO:138, SEQ ID NOs:140-141, SEQ ID NOs:143-146, SEQ ID NO:148, SEQ ID NO:150, SEQ ID NO:152, SEQ ID NO:154, SEQ ID NOs:156-157, SEQ ID NO:159, SEQ ID NO:161, SEQ ID NO:163, SEQ ID NO:165, SEQ ID NOs:167-175, SEQ ID NO:177, SEQ ID NOs:179-182, SEQ ID NO:184, SEQ ID NO:186, SEQ ID NO:186, SEQ ID NOs:188-189, SEQ ID NO:191, SEQ ID NOs:193-205, SEQ ID NOs:207-210, SEQ ID NOs:212-220, SEQ ID NO:222, SEQ ID NO:224, SEQ ID NO:226, SEQ ID NO:228, SEQ ID NO:230, SEQ ID NO:232, SEQ ID NO:234, SEQ ID NO:236, SEQ ID NOs:238-239, SEQ ID NO:241, and SEQ ID NOs:243-247, where a tissue of a plant produced from the plant cell has a difference in the level of protein as compared to the corresponding level in tissue of a control plant that does not comprise the nucleic acid.

[0008] In another aspect, a method of modulating the level of protein in a plant is provided. The method comprises introducing into a plant cell an exogenous nucleic acid comprising a nucleotide sequence encoding a polypeptide having 80 percent or greater sequence identity to an amino acid sequence selected from the group consisting of SEQ ID NOs:96-98, SEQ ID NO:100, SEQ ID NO:102, SEQ ID NO:106, SEQ ID NO:108, SEQ ID NO:110, SEQ ID NO:112, SEQ ID NO:114, SEQ ID NO:116, SEQ ID NOs:118-119, SEQ ID NO:122, SEQ ID NO:125, SEQ ID NO:128, SEQ ID NO:131, SEQ ID NOs:133-134, SEQ ID NO:136, SEQ ID NO:138, SEQ ID NO:140, SEQ ID NO:143, SEQ ID NO:148, SEQ ID NO:150, SEQ ID NO:152, SEQ ID NO:154, SEQ ID NO:156, SEQ ID NO:159, SEQ ID NO:161, SEQ ID NO:163, SEQ ID NO:165, SEQ ID NO:167, SEQ ID NO:177, SEQ ID NO:179, SEQ ID NO:181, SEQ ID NO:184, SEQ ID NO:186, SEQ ID NO:188, SEQ ID NO:191, SEQ ID NO:193, SEQ ID NO:207, SEQ ID NO:212, SEQ ID NO:222, SEQ ID NO:224, SEQ ID NO:226, SEQ ID NO:228, SEQ ID NO:230, SEQ ID NO:232, SEQ ID NO:234, SEQ ID NO:236, SEQ ID NO:238, SEQ ID NO:241, and SEQ ID NO:243, where a tissue of a plant produced from the plant cell has a difference in the level of protein as compared to the corresponding level in tissue of a control plant that does not comprise the nucleic acid.

[0009] In another aspect, a method of modulating the level of protein in a plant is provided. The method comprises introducing into a plant cell an exogenous nucleic acid comprising a nucleotide sequence having 80 percent or greater sequence identity to a nucleotide sequence corresponding to SEQ ID NO:115, where a tissue of a plant produced from the plant cell has a difference in the level of protein as compared to the corresponding level in tissue of a control plant that does not comprise the nucleic acid.

[0010] In another aspect, a method of modulating the level of protein in a plant is provided. The method comprises introducing into a plant cell an exogenous nucleic acid comprising a nucleotide sequence having 80 percent or greater sequence identity to a nucleotide sequence selected from the group consisting of SEQ ID NO:95, SEQ ID NO:99, SEQ ID NO:101, SEQ ID NO:104, SEQ ID NO:105, SEQ ID NO:111, SEQ ID NO:113, SEQ ID NO:115, SEQ ID NO:117, SEQ ID NO:120, SEQ ID NO:121, SEQ ID NO:123, SEQ ID NO:124, SEQ ID NO:127, SEQ ID NO:129, SEQ ID NO:130, SEQ ID NO:132, SEQ ID NO:135, SEQ ID NO:137, SEQ ID NO:139, SEQ ID NO:142, SEQ ID NO:147, SEQ ID NO:149, SEQ ID NO:151, SEQ ID NO:153, SEQ ID NO:155, SEQ ID NO:158, SEQ ID NO:160, SEQ ID NO:162, SEQ ID NO:164, SEQ ID NO:166, SEQ ID NO:176, SEQ ID NO:178, SEQ ID NO:183, SEQ ID NO:187, SEQ ID NO:190, SEQ ID NO:192, SEQ ID NO:206, SEQ ID NO:211, SEQ ID NO:221, SEQ ID NO:223, SEQ ID NO:225, SEQ ID NO:227, SEQ ID NO:229, SEQ ID NO:231, SEQ ID NO:233, SEQ ID NO:235, SEQ ID NO:237, SEQ ID NO:240, SEQ ID NO:242, and SEQ ID NO:248, where a tissue of a plant produced from the plant cell has a difference in the level of protein as compared to the corresponding level in tissue of a control plant that does not comprise the nucleic acid.

[0011] The sequence identity can be 85 percent or greater, 90 percent or greater, or 95 percent or greater. The nucleotide sequence can encode a polypeptide comprising an amino acid sequence corresponding to SEQ ID NO:96. The nucleotide sequence can encode a polypeptide comprising an amino acid sequence corresponding to SEQ ID NO:102. The nucleotide sequence can encode a polypeptide comprising an amino acid sequence corresponding to SEQ ID NO:112. The nucleotide sequence can encode a polypeptide comprising an amino acid sequence corresponding to SEQ ID NO:114. The nucleotide sequence can encode a polypeptide comprising an amino acid sequence corresponding to SEQ ID NO:116. The nucleotide sequence can encode a polypeptide comprising an amino acid sequence corresponding to SEQ ID NO:118. The nucleotide sequence can encode a polypeptide comprising an amino acid sequence corresponding to SEQ ID NO:128. The nucleotide sequence can encode a polypeptide comprising an amino acid sequence corresponding to SEQ ID NO:181. The nucleic acid can comprise a nucleotide sequence corresponding to SEQ ID NO:115. The introducing step can comprise introducing the nucleic acid into a plurality of plant cells. The method can further comprise the step of producing a plurality of plants from the plant cells. The method can further comprise the step of selecting one or more plants from the plurality of plants that have the difference in the level of protein. The method can further comprise the step of producing a plant from the plant cell.

[0012] The difference can be an increase in the level of protein. The exogenous nucleic acid can be operably linked to a regulatory region. The regulatory region can be a promoter. The promoter can be a tissue-preferential, broadly expressing, or inducible promoter. The promoter can be a maturing endosperm promoter. The plant can be a dicot. The plant can be a member of the genus Arachis, Brassica, Carthamus, Glycine, Gossypium, Helianthus, Lactuca, Linum, Lycopersicon, Medicago, Olea, Pisum, Solanum, Trifolium, or Vitis. The plant can be a monocot. The plant can be a member of the genus Avena, Elaeis, Hordeum, Musa, Oryza, Phleum, Secale, Sorghum, Triticosecale, Triticum, or Zea. The nucleotide sequence can encode a polypeptide comprising an amino acid sequence corresponding to SEQ ID NO:96, and the plant can be a member of the genus Oryza. The nucleotide sequence can encode a polypeptide comprising an amino acid sequence corresponding to SEQ ID NO:112, and the plant can be a member of the genus Oryza. The tissue can be seed tissue.

[0013] A method of producing a plant tissue is also provided. The method comprises growing a plant cell comprising an exogenous nucleic acid comprising a nucleotide sequence encoding a polypeptide having 80 percent or greater sequence identity to an amino acid sequence selected from the group consisting of SEQ ID NOs:96-98, SEQ ID NO:100, SEQ ID NOs:102-103, SEQ ID NOs:106-110, SEQ ID NO:112, SEQ ID NO:114, SEQ ID NO:116, SEQ ID NOs:118-119, SEQ ID NO:122, SEQ ID NOs:125-126, SEQ ID NO:128, SEQ ID NO:131, SEQ ID NOs:133-134, SEQ ID NO:136, SEQ ID NO:138, SEQ ID NOs:140-141, SEQ ID NOs:143-146, SEQ ID NO:148, SEQ ID NO:150, SEQ ID NO:152, SEQ ID NO:154, SEQ ID NOs:156-157, SEQ ID NO:159, SEQ ID NO:161, SEQ ID NO:163, SEQ ID NO:165, SEQ ID NOs:167-175, SEQ ID NO:177, SEQ ID NOs:179-182, SEQ ID NO:184, SEQ ID NO:186, SEQ ID NO:186, SEQ ID NOs:188-189, SEQ ID NO:191, SEQ ID NOs:193-205, SEQ ID NOs:207-210, SEQ ID NOs:212-220, SEQ ID NO:222, SEQ ID NO:224, SEQ ID NO:226, SEQ ID NO:228, SEQ ID NO:230, SEQ ID NO:232, SEQ ID NO:234, SEQ ID NO:236, SEQ ID NOs:238-239, SEQ ID NO:241, and SEQ ID NOs:243-247, where the tissue has a difference in the level of protein as compared to the corresponding level in tissue of a control plant that does not comprise the nucleic acid.

[0014] In another aspect, a method of producing a plant tissue is provided. The method comprises growing a plant cell comprising an exogenous nucleic acid comprising a nucleotide sequence encoding a polypeptide having 80 percent or greater sequence identity to an amino acid sequence selected from the group consisting of SEQ ID NOs:96-98, SEQ ID NO:100, SEQ ID NO:102, SEQ ID NO:106, SEQ ID NO:108, SEQ ID NO:110, SEQ ID NO:112, SEQ ID NO:114, SEQ ID NO:116, SEQ ID NOs:118-119, SEQ ID NO:122, SEQ ID NO:125, SEQ ID NO:128, SEQ ID NO:131, SEQ ID NOs:133-134, SEQ ID NO:136, SEQ ID NO:138, SEQ ID NO:140, SEQ ID NO:143, SEQ ID NO:148, SEQ ID NO:150, SEQ ID NO:152, SEQ ID NO:154, SEQ ID NO:156, SEQ ID NO:159, SEQ ID NO:161, SEQ ID NO:163, SEQ ID NO:165, SEQ ID NO:167, SEQ ID NO:177, SEQ ID NO:179, SEQ ID NO:181, SEQ ID NO:184, SEQ ID NO:186, SEQ ID NO:188, SEQ ID NO:191, SEQ ID NO:193, SEQ ID NO:207, SEQ ID NO:212, SEQ ID NO:222, SEQ ID NO:224, SEQ ID NO:226, SEQ ID NO:228, SEQ ID NO:230, SEQ ID NO:232, SEQ ID NO:234, SEQ ID NO:236, SEQ ID NO:238, SEQ ID NO:241, and SEQ ID NO:243, where the tissue has a difference in the level of protein as compared to the corresponding level in tissue of a control plant that does not comprise the nucleic acid.

[0015] In another aspect, a method of producing a plant tissue is provided. The method comprises growing a plant cell comprising an exogenous nucleic acid comprising a nucleotide sequence having 80 percent or greater sequence identity to a nucleotide sequence corresponding to SEQ ID NO:115, where the tissue has a difference in the level of protein as compared to the corresponding level in tissue of a control plant that does not comprise the nucleic acid.

[0016] In another aspect, a method of producing a plant tissue is provided. The method comprises growing a plant cell comprising an exogenous nucleic acid comprising a nucleotide sequence having 80 percent or greater sequence identity to a nucleotide sequence selected from the group consisting of SEQ ID NO:95, SEQ ID NO:99, SEQ ID NO:101, SEQ ID NO:104, SEQ ID NO:105, SEQ ID NO:111, SEQ ID NO:113, SEQ ID NO:115, SEQ ID NO:117, SEQ ID NO:120, SEQ ID NO:121, SEQ ID NO:123, SEQ ID NO:124, SEQ ID NO:127, SEQ ID NO:129, SEQ ID NO:130, SEQ ID NO:132, SEQ ID NO:135, SEQ ID NO:137, SEQ ID NO:139, SEQ ID NO:142, SEQ ID NO:147, SEQ ID NO:149, SEQ ID NO:151, SEQ ID NO:153, SEQ ID NO:155, SEQ ID NO:158, SEQ ID NO:160, SEQ ID NO:162, SEQ ID NO:164, SEQ ID NO:166, SEQ ID NO:176, SEQ ID NO:178, SEQ ID NO:183, SEQ ID NO:187, SEQ ID NO:190, SEQ ID NO:192, SEQ ID NO:206, SEQ ID NO:211, SEQ ID NO:221, SEQ ID NO:223, SEQ ID NO:225, SEQ ID NO:227, SEQ ID NO:229, SEQ ID NO:231, SEQ ID NO:233, SEQ ID NO:235, SEQ ID NO:237, SEQ ID NO:240, SEQ ID NO:242, and SEQ ID NO:248, where the tissue has a difference in the level of protein as compared to the corresponding level in tissue of a control plant that does not comprise the nucleic acid.

[0017] The sequence identity can be 85 percent or greater, 90 percent or greater, or 95 percent or greater. The nucleotide sequence can encode a polypeptide comprising an amino acid sequence corresponding to SEQ ID NO:96. The nucleotide sequence can encode a polypeptide comprising an amino acid sequence corresponding to SEQ ID NO:102. The nucleotide sequence can encode a polypeptide comprising an amino acid sequence corresponding to SEQ ID NO:112. The nucleotide sequence can encode a polypeptide comprising an amino acid sequence corresponding to SEQ ID NO:114. The nucleotide sequence can encode a polypeptide comprising an amino acid sequence corresponding to SEQ ID NO:116. The nucleotide sequence can encode a polypeptide comprising an amino acid sequence corresponding to SEQ ID NO:118. The nucleotide sequence can encode a polypeptide comprising an amino acid sequence corresponding to SEQ ID NO:128. The nucleotide sequence can encode a polypeptide comprising an amino acid sequence corresponding to SEQ ID NO:181. The exogenous nucleic acid can comprise a nucleotide sequence corresponding to SEQ ID NO:115.

[0018] The difference can be an increase in the level of protein. The exogenous nucleic acid can be operably linked to a regulatory region. The regulatory region can be a promoter. The promoter can be a tissue-preferential, broadly expressing, or inducible promoter. The promoter can be a maturing endosperm promoter. The plant tissue can be dicotyledonous. The plant tissue can be a member of the genus Arachis, Brassica, Carthamus, Glycine, Gossypium, Helianthus, Lactuca, Linum, Lycopersicon, Medicago, Olea, Pisum, Solanum, Trifolium, or Vitis. The plant tissue can be monocotyledonous. The plant tissue can be a member of the genus Avena, Elaeis, Hordeum, Musa, Oryza, Phleum, Secale, Sorghum, Triticosecale, Triticum, or Zea. The nucleotide sequence can encode a polypeptide comprising an amino acid sequence corresponding to SEQ ID NO:96, and the plant tissue can be a member of the genus Oryza. The nucleotide sequence can encode a polypeptide comprising an amino acid sequence corresponding to SEQ ID NO:112, and the plant tissue can be a member of the genus Oryza. The tissue can be seed tissue.

[0019] A plant cell is also provided. The plant cell comprises an exogenous nucleic acid comprising a nucleotide sequence encoding a polypeptide having 80 percent or greater sequence identity to an amino acid sequence selected from the group consisting of SEQ ID NOs:96-98, SEQ ID NO:100, SEQ ID NOs:102-103, SEQ ID NOs:106-110, SEQ ID NO:112, SEQ ID NO:114, SEQ ID NO:116, SEQ ID NOs:118-119, SEQ ID NO:122, SEQ ID NOs:125-126, SEQ ID NO:128, SEQ ID NO:131, SEQ ID NOs:133-134, SEQ ID NO:136, SEQ ID NO:138, SEQ ID NOs:140-141, SEQ ID NOs:143-146, SEQ ID NO:148, SEQ ID NO:150, SEQ ID NO:152, SEQ ID NO:154, SEQ ID NOs:156-157, SEQ ID NO:159, SEQ ID NO:161, SEQ ID NO:163, SEQ ID NO:165, SEQ ID NOs:167-175, SEQ ID NO:177, SEQ ID NOs:179-182, SEQ ID NO:184, SEQ ID NO:186, SEQ ID NO:186, SEQ ID NOs:188-189, SEQ ID NO:191, SEQ ID NOs:193-205, SEQ ID NOs:207-210, SEQ ID NOs:212-220, SEQ ID NO:222, SEQ ID NO:224, SEQ ID NO:226, SEQ ID NO:228, SEQ ID NO:230, SEQ ID NO:232, SEQ ID NO:234, SEQ ID NO:236, SEQ ID NOs:238-239, SEQ ID NO:241, and SEQ ID NOs:243-247, where a tissue of a plant produced from the plant cell has a difference in the level of protein as compared to the corresponding level in tissue of a control plant that does not comprise the nucleic acid.

[0020] In another aspect, a plant cell is provided. The plant cell comprises an exogenous nucleic acid comprising a nucleotide sequence encoding a polypeptide having 80 percent or greater sequence identity to an amino acid sequence selected from the group consisting of SEQ ID NOs:96-98, SEQ ID NO:100, SEQ ID NO:102, SEQ ID NO:106, SEQ ID NO:108, SEQ ID NO:110, SEQ ID NO:112, SEQ ID NO:114, SEQ ID NO:116, SEQ ID NOs:118-119, SEQ ID NO:122, SEQ ID NO:125, SEQ ID NO:128, SEQ ID NO:131, SEQ ID NOs:133-134, SEQ ID NO:136, SEQ ID NO:138, SEQ ID NO:140, SEQ ID NO:143, SEQ ID NO:148, SEQ ID NO:150, SEQ ID NO:152, SEQ ID NO:154, SEQ ID NO:156, SEQ ID NO:159, SEQ ID NO:161, SEQ ID NO:163, SEQ ID NO:165, SEQ ID NO:167, SEQ ID NO:177, SEQ ID NO:179, SEQ ID NO:181, SEQ ID NO:184, SEQ ID NO:186, SEQ ID NO:188, SEQ ID NO:191, SEQ ID NO:193, SEQ ID NO:207, SEQ ID NO:212, SEQ ID NO:222, SEQ ID NO:224, SEQ ID NO:226, SEQ ID NO:228, SEQ ID NO:230, SEQ ID NO:232, SEQ ID NO:234, SEQ ID NO:236, SEQ ID NO:238, SEQ ID NO:241, and SEQ ID NO:243, where a tissue of a plant produced from the plant cell has a difference in the level of protein as compared to the corresponding level in tissue of a control plant that does not comprise the nucleic acid.

[0021] In another aspect, a plant cell is provided. The plant cell comprises an exogenous nucleic acid comprising a nucleotide sequence having 80 percent or greater sequence identity to a nucleotide sequence corresponding to SEQ ID NO:115, where a tissue of a plant produced from the plant cell has a difference in the level of protein as compared to the corresponding level in tissue of a control plant that does not comprise the nucleic acid.

[0022] In another aspect, a plant cell is provided. The plant cell comprises an exogenous nucleic acid comprising a nucleotide sequence having 80 percent or greater sequence identity to a nucleotide sequence selected from the group consisting of SEQ ID NO:95, SEQ ID NO:99, SEQ ID NO:101, SEQ ID NO:104, SEQ ID NO:105, SEQ ID NO:111, SEQ ID NO:113, SEQ ID NO:115, SEQ ID NO:117, SEQ ID NO:120, SEQ ID NO:121, SEQ ID NO:123, SEQ ID NO:124, SEQ ID NO:127, SEQ ID NO:129, SEQ ID NO:130, SEQ ID NO:132, SEQ ID NO:135, SEQ ID NO:137, SEQ ID NO:139, SEQ ID NO:142, SEQ ID NO:147, SEQ ID NO:149, SEQ ID NO:151, SEQ ID NO:153, SEQ ID NO:155, SEQ ID NO:158, SEQ ID NO:160, SEQ ID NO:162, SEQ ID NO:164, SEQ ID NO:166, SEQ ID NO:176, SEQ ID NO:178, SEQ ID NO:183, SEQ ID NO:187, SEQ ID NO:190, SEQ ID NO:192, SEQ ID NO:206, SEQ ID NO:211, SEQ ID NO:221, SEQ ID NO:223, SEQ ID NO:225, SEQ ID NO:227, SEQ ID NO:229, SEQ ID NO:231, SEQ ID NO:233, SEQ ID NO:235, SEQ ID NO:237, SEQ ID NO:240, SEQ ID NO:242, and SEQ ID NO:248, where a tissue of a plant produced from the plant cell has a difference in the level of protein as compared to the corresponding level in tissue of a control plant that does not comprise the nucleic acid.

[0023] The sequence identity can be 85 percent or greater, 90 percent or greater, or 95 percent or greater. The nucleotide sequence can encode a polypeptide comprising an amino acid sequence corresponding to SEQ ID NO:96. The nucleotide sequence can encode a polypeptide comprising an amino acid sequence corresponding to SEQ ID NO:102. The nucleotide sequence can encode a polypeptide comprising an amino acid sequence corresponding to SEQ ID NO:112. The nucleotide sequence can encode a polypeptide comprising an amino acid sequence corresponding to SEQ ID NO:114. The nucleotide sequence can encode a polypeptide comprising an amino acid sequence corresponding to SEQ ID NO:116. The nucleotide sequence can encode a polypeptide comprising an amino acid sequence corresponding to SEQ ID NO:118. The nucleotide sequence can encode a polypeptide comprising an amino acid sequence corresponding to SEQ ID NO:128. The nucleotide sequence can encode a polypeptide comprising an amino acid sequence corresponding to SEQ ID NO:181. The exogenous nucleic acid can comprise a nucleotide sequence corresponding to SEQ ID NO:115.

[0024] The difference can be an increase in the level of protein. The exogenous nucleic acid can be operably linked to a regulatory region. The regulatory region can be a promoter. The promoter can be a tissue-preferential, broadly expressing, or inducible promoter. The promoter can be a maturing endosperm promoter. The plant can be a dicot. The plant can be a member of the genus Arachis, Brassica, Carthamus, Glycine, Gossypium, Helianthus, Lactuca, Linum, Lycopersicon, Medicago, Olea, Pisum, Solanum, Trifolium, or Vitis. The plant can be a monocot. The plant can be a member of the genus Avena, Elaeis, Hordeum, Musa, Oryza, Phleum, Secale, Sorghum, Triticosecale, Triticum, or Zea. The nucleotide sequence can encode a polypeptide comprising an amino acid sequence corresponding to SEQ ID NO:96, and the plant can be a member of the genus Oryza. The nucleotide sequence can encode a polypeptide comprising an amino acid sequence corresponding to SEQ ID NO:112, and the plant can be a member of the genus Oryza. The tissue can be seed tissue.

[0025] A transgenic plant is also provided. The transgenic plant comprises any of the plant cells described above. Progeny of the transgenic plant are also provided. The progeny have a difference in the level of protein as compared to the level of protein in a corresponding control plant that does not comprise the exogenous nucleic acid. Seed, vegetative tissue, and fruit from the transgenic plant are also provided. In addition, food products and feed products comprising seed, vegetative tissue, and/or fruit from the transgenic plant are provided. Protein from the transgenic plant, which can be a soybean plant, is also provided.

[0026] In another aspect, an isolated nucleic acid molecule is provided. The isolated nucleic acid molecule comprises a nucleotide sequence having 95% or greater sequence identity to the nucleotide sequence set forth in SEQ ID NO:105.

[0027] In another aspect, an isolated nucleic acid is provided. The isolated nucleic acid comprises a nucleotide sequence encoding a polypeptide having 80% or greater sequence identity to the amino acid sequence set forth in SEQ ID NO:106.

[0028] In another aspect, an isolated nucleic acid molecule is provided. The isolated nucleic acid molecule comprises a nucleotide sequence having 95% or greater sequence identity to the nucleotide sequence set forth in SEQ ID NO:121.

[0029] In another aspect, an isolated nucleic acid is provided. The isolated nucleic acid comprises a nucleotide sequence encoding a polypeptide having 80% or greater sequence identity to the amino acid sequence set forth in SEQ ID NO:122.

[0030] In another aspect, an isolated nucleic acid molecule is provided. The isolated nucleic acid molecule comprises a nucleotide sequence having 95% or greater sequence identity to the nucleotide sequence set forth in SEQ ID NO:124.

[0031] In another aspect, an isolated nucleic acid is provided. The isolated nucleic acid comprises a nucleotide sequence encoding a polypeptide having 80% or greater sequence identity to the amino acid sequence set forth in SEQ ID NO:125.

[0032] In another aspect, an isolated nucleic acid molecule is provided. The isolated nucleic acid molecule comprises a nucleotide sequence having 95% or greater sequence identity to the nucleotide sequence set forth in SEQ ID NO:130.

[0033] In another aspect, an isolated nucleic acid is provided. The isolated nucleic acid comprises a nucleotide sequence encoding a polypeptide having 80% or greater sequence identity to the amino acid sequence set forth in SEQ ID NO:131.

[0034] In another aspect, an isolated nucleic acid molecule is provided. The isolated nucleic acid molecule comprises a nucleotide sequence having 95% or greater sequence identity to the nucleotide sequence set forth in SEQ ID NO:132.

[0035] In another aspect, an isolated nucleic acid is provided. The isolated nucleic acid comprises a nucleotide sequence encoding a polypeptide having 80% or greater sequence identity to the amino acid sequence set forth in SEQ ID NO:133.

[0036] A method of producing a plant also is provided. The method includes growing a plant cell that includes an exogenous nucleic acid, the exogenous nucleic acid comprising a regulatory region operably linked to a nucleotide sequence encoding a polypeptide, wherein the HMM bit score of the amino acid sequence of the polypeptide is greater than about 20, the HMM based on the amino acid sequences depicted in one of FIGS. 1 to 7, and wherein the plant has a difference in protein content as compared to the corresponding protein content of a control plant that does not comprise the nucleic acid.

[0037] In yet another aspect, a method of modulating the level of protein in a plant is provided. The method includes introducing into a plant cell an exogenous nucleic acid, the exogenous nucleic acid comprising a regulatory region operably linked to a nucleotide sequence encoding a polypeptide, wherein the HMM bit score of the amino acid sequence of the polypeptide is greater than about 20, the HMM based on the amino acid sequences depicted in one of FIGS. 1 to 7, and wherein a tissue of a plant produced from the plant cell has a difference in the protein content as compared to the corresponding protein content of a control plant that does not comprise the exogenous nucleic acid.

[0038] A plant cell comprising an exogenous nucleic acid also is provided as well as a transgenic plant that comprises such a plant cell. The exogenous nucleic acid includes a regulatory region operably linked to a nucleotide sequence encoding a polypeptide, wherein the HMM bit score of the amino acid sequence of the polypeptide is greater than about 20, the HMM based on the amino acid sequences depicted in one of FIGS. 1 to 7, and wherein a tissue of a plant produced from the plant cell has a difference in protein content as compared to the corresponding protein content of a control plant that does not comprise the nucleic acid.

[0039] Unless otherwise defined, all technical and scientific terms used herein have the same meaning as commonly understood by one of ordinary skill in the art to which this invention pertains. Although methods and materials similar or equivalent to those described herein can be used to practice the invention, suitable methods and materials are described below. All publications, patent applications, patents, and other references mentioned herein are incorporated by reference in their entirety. In case of conflict, the present specification, including definitions, will control. In addition, the materials, methods, and examples are illustrative only and not intended to be limiting.

[0040] The details of one or more embodiments of the invention are set forth in the accompanying drawings and the description below. Other features, objects, and advantages of the invention will be apparent from the description and drawings, and from the claims.

### DESCRIPTION OF THE DRAWINGS

[0041] FIG. 1 is an alignment of Lead Ceres ANNOT ID 826303 (SEQ ID NO:96) with homologous and/or orthologous amino acid sequences CeresClone:1103899 (SEQ ID NO:97), CeresClone:463034 (SEQ ID NO:98), and CeresClone:1816436 (SEQ ID NO:100). In all the alignment figures shown herein, a dash in an aligned sequence represents a gap, i.e., a lack of an amino acid at that position. Identical amino acids or conserved amino acid substitutions among aligned sequences are identified by boxes. FIG. 1 and the other alignment figures provided herein were produced using MUSCLE version 3.52 based on the sequence alignments generated with ProbCon (Do et al., Genome Res., 15(2):330-40 (2005)) version 1.11.

[0042] FIGS. 2A-2B are an alignment of Lead Annot ID 571199 (SEQ ID NO:102) with homologous and/or orthologous amino acid sequences CeresAnnot:1469254 (SEQ ID NO:106), gi|92895842 (SEQ ID NO:107), CeresClone:1121764 (SEQ ID NO:108), gi|33146851 (SEQ ID NO:109), and CeresClone:278526 (SEQ ID NO:110).

[0043] FIG. 3 is an alignment of Lead Ceres ANNOT ID 564367 (SEQ ID NO:118) with homologous and/or orthologous amino acid sequences CeresClone:594825 (SEQ ID NO:119), CeresAnnot:1486448 (SEQ ID NO:125), and gi|115479583 (SEQ ID NO:126).

[0044] FIG. 4 is an alignment of Lead Ceres ANNOT ID 851745 (SEQ ID NO:128) with homologous and/or orthologous amino acid sequences CeresAnnot 1455259 (SEQ ID NO:131), CeresClone 1939499 (SEQ ID NO:133), and CeresClone 605517 (SEQ ID NO:134).

[0045] FIGS. 5A-5D are an alignment of Ceres CLONE ID no. 97982 (SEQ ID NO:114) with homologous and/or orthologous amino acid sequences gi|46917479 (SEQ ID NO:172), gi|75298155 (SEQ ID NO:173), gi|71608998 (SEQ ID NO:220), Ceres CLONE ID 1938642 (SEQ ID NO:222), Ceres ANNOT ID 1488622 (SEQ ID NO:224), Ceres CLONE ID 593224 (SEQ ID NO:230), Ceres ANNOT ID 6014891 (SEQ ID NO:232), Ceres CLONE ID 686770 (SEQ ID NO:236), Ceres CLONE ID 1060795 (SEQ ID NO:238), gi|152955979 (SEQ ID NO:239), Ceres CLONE ID 1913328 (SEQ ID NO:241), gi|125561861 (SEQ ID NO:244), gi|42408633 (SEQ ID NO:245), and gi|7533036 (SEQ ID NO:246).

[0046] FIGS. 6A-6C are an alignment of Ceres ANNOT ID 842015 (SEQ ID NO:112) with homologous and/or orthologous amino acid sequences Ceres ANNOT ID 1531521 (SEQ ID NO:165), gi|125538901 (SEQ ID NO:174), and gi|125581583 (SEQ ID NO:175).

[0047] FIGS. 7A-7E are an alignment of full-length Ceres CLONE ID 258034 (SEQ ID NO:181) with homologous and/or orthologous amino acid sequences gi|10720232 (SEQ ID NO:182), Ceres CLONE ID 1832498 (SEQ ID NO:184), gi|10720220 (SEQ ID NO:189), Ceres ANNOT ID 1470542 (SEQ ID NO:191), gi|15239574 (SEQ ID NO:194), gi|266742 (SEQ ID NO:200), gi|10720233 (SEQ ID NO:201), gi|21068893 (SEQ ID NO:202), gi|10720236 (SEQ ID NO:204), gi|90398977 (SEQ ID NO:205), Ceres ANNOT ID 6014695 (SEQ ID NO:207), gi|10720235 (SEQ ID NO:208), gi|58003345 (SEQ ID NO:209), gi|7330644 (SEQ ID NO:210), Ceres CLONE ID 1787867 (SEQ ID NO:212), gi|18071421 (SEQ ID NO:213), gi|116058730 (SEQ ID NO:215), gi|34915978 (SEQ ID NO:216), and gi|9587209 (SEQ ID NO:218).

### DETAILED DESCRIPTION

[0048] The invention features methods and materials related to modulating (e.g., increasing or decreasing) protein levels in plants. In some embodiments, the plants may also have modulated levels of oil. The methods can include transforming a plant cell with a nucleic acid encoding a protein-modulating polypeptide, wherein expression of the polypeptide results in a modulated level of protein. Plant cells produced using such methods can be grown to produce plants having an increased or decreased protein content. Such plants, and the seeds of such plants, may be used to produce, for example, foodstuffs and animal feed having an increased protein content and nutritional value.

[0049] Polypeptides

[0050] The term “polypeptide” as used herein refers to a compound of two or more subunit amino acids, amino acid analogs, or other peptidomimetics, regardless of post-translational modification, e.g., phosphorylation or glycosylation. The subunits may be linked by peptide bonds or other bonds such as, for example, ester or ether bonds. The term “amino acid” refers to natural and/or unnatural or synthetic amino acids, including D/L optical isomers. Full-length proteins, analogs, mutants, and fragments thereof are encompassed by this definition.

[0051] Polypeptides described herein include protein-modulating polypeptides. Protein-modulating polypeptides can be effective to modulate protein levels when expressed in a plant or plant cell. Modulation of the level of protein can be either an increase or a decrease in the level of protein relative to the corresponding level in control plants.

[0052] A protein-modulating polypeptide can contain a TLD domain, which is predicted to be characteristic of an enzyme. The TLD domain is restricted to eukaryotes, and is often found associated with Fibrinogen_C6. SEQ ID NO:96 sets forth the amino acid sequence of an Arabidopsis clone, identified herein as Ceres ANNOT ID no. 826303 (SEQ ID NO:95), that is predicted to encode a polypeptide containing a TLD domain.

[0053] A protein-modulating polypeptide can comprise the amino acid sequence set forth in SEQ ID NO:96. Alternatively, a protein-modulating polypeptide can be a homolog, ortholog, or variant of the polypeptide having the amino acid sequence set forth in SEQ ID NO:96. For example, a protein-modulating polypeptide can have an amino acid sequence with at least 47% sequence identity, e.g., 50%, 52%, 56%, 59%, 61%, 65%, 70%, 75%, 80%, 85%, 90%, 95%, 97%, 98%, or 99% sequence identity, to the amino acid sequence set forth in SEQ ID NO:96.

[0054] Amino acid sequences of homologs and/or orthologs of the polypeptide having the amino acid sequence set forth in SEQ ID NO:96 are provided in FIG. 1 and in the sequence listing. For example, the alignment in FIG. 1 provides the amino acid sequences of Lead Ceres ANNOT ID 826303 (SEQ ID NO:96), CeresClone:1103899 (SEQ ID NO:97), CeresClone:463034 (SEQ ID NO:98), and CeresClone:1816436 (SEQ ID NO:100). Other homologs and/or orthologs of SEQ ID NO:96 include Ceres ANNOT ID 1516248 (SEQ ID NO:148), Ceres ANNOT ID 1462954 (SEQ ID NO:150), Ceres CLONE ID 467151 (SEQ ID NO:152), Ceres ANNOT ID 6121933 (SEQ ID NO:154), Ceres CLONE ID 884270 (SEQ ID NO:156), gi|147801307 (SEQ ID NO:157), Ceres CLONE ID 1804056 (SEQ ID NO:159), Ceres CLONE ID 1795473 (SEQ ID NO:161), and Ceres CLONE ID 1811977 (SEQ ID NO:163).

[0055] In some cases, a protein-modulating polypeptide includes a polypeptide having at least 80% sequence identity, e.g., 80%, 85%, 90%, 95%, 97%, 98%, or 99% sequence identity, to an amino acid sequence corresponding to SEQ ID NO:97, SEQ ID NO:98, SEQ ID NO:100, SEQ ID NO:148, SEQ ID NO:150, SEQ ID NO:152, SEQ ID NO:154, SEQ ID NO:156, SEQ ID NO:157, SEQ ID NO:159, SEQ ID NO:161, or SEQ ID NO:163.

[0056] A protein-modulating polypeptide can contain an ATP_bind_{—}3 domain characteristic of polypeptides belonging to the PP-loop superfamily. Members of the PP-loop superfamily contain a conserved amino acid sequence motif identified in four groups of enzymes that catalyze the hydrolysis of the alpha-beta phosphate bond of ATP, namely GMP synthetases, argininosuccinate synthetases, asparagine synthetases, and ATP sulfurylases. The motif is also present in Rhodobacter capsulata AdgA, Escherichia coli NtrL, and Bacillus subtilis OutB. The observed pattern of amino acid residue conservation and predicted secondary structures suggest that this motif may be a modified version of the P-loop of nucleotide binding domains, and that it is likely to be involved in phosphate binding. More particularly, the motif appears to be a part of an ATP pyrophophatase domain. In some polypeptides, the pyrophosphatase domain is associated with amidotransferase domains (type I or type II), a putative citrulline-aspartate ligase domain, or a nitrilase/amidase domain. SEQ ID NO:112 sets forth the amino acid sequence of an Arabidopsis clone, identified herein as Ceres ANNOT ID no. 842015 (SEQ ID NO:111), that is predicted to encode a polypeptide containing an ATP_bind_{—}3 domain.

[0057] A protein-modulating polypeptide can comprise the amino acid sequence set forth in SEQ ID NO:112. Alternatively, a protein-modulating polypeptide can be a homolog, ortholog, or variant of the polypeptide having the amino acid sequence set forth in SEQ ID NO:112. For example, a protein-modulating polypeptide can have an amino acid sequence with at least 40% sequence identity, e.g., 41%, 46%, 50%, 55%, 60%, 65%, 70%, 75%, 80%, 85%, 90%, 95%, 97%, 98%, or 99% sequence identity, to the amino acid sequence set forth in SEQ ID NO:112.

[0058] Amino acid sequences of homologs and/or orthologs of the polypeptide having the amino acid sequence set forth in SEQ ID NO:112 are provided in FIGS. 6A-6C and in the sequence listing. For example, the alignment in FIGS. 6A-6C provides the amino acid sequences of Ceres ANNOT ID no. 842015 (SEQ ID NO:112), Ceres ANNOT ID 1531521 (SEQ ID NO:165), gi|125538901 (SEQ ID NO:174), and gi|125581583 (SEQ ID NO:175). Other homologs and/or orthologs of SEQ ID NO:112 include Ceres ANNOT ID 1478015 (SEQ ID NO:167), gi|42572525 (SEQ ID NO:168), gi|42572523 (SEQ ID NO:169), gi|19071761 (SEQ ID NO:170), and gi|9294051 (SEQ ID NO:171).

[0059] In some cases, a protein-modulating polypeptide includes a polypeptide having at least 80% sequence identity, e.g., 80%, 85%, 90%, 95%, 97%, 98%, or 99% sequence identity, to an amino acid sequence corresponding to SEQ ID NO:165, SEQ ID NO:167, SEQ ID NO:168, SEQ ID NO:169, SEQ ID NO:170, SEQ ID NO:171, SEQ ID NO:174, or SEQ ID NO:175.

[0060] A protein-modulating polypeptide can contain a Carb_anhydrase domain characteristic of eukaryotic-type carbonic anhydrase polypeptides. The terms carbonic dehydratase and carbonic anhydrase are synonyms. Carbonate dehydratase polypeptides are zinc metalloenzymes that catalyze the reversible hydration of carbon dioxide. Eight enzymatic and evolutionary related forms of carbonic anhydrase are known to exist in vertebrates: three cytosolic isozymes (CA-I, CA-II and CA-III); two membrane-bound forms (CA-IV and CA-VII); a mitochondrial form (CA-V); a secreted salivary form (CA-VI); and an isozyme. SEQ ID NO:114 sets forth the amino acid sequence of an Arabidopsis clone, identified herein as Ceres CLONE ID 97982 (SEQ ID NO:113), that is predicted to encode a polypeptide containing a Carb_anhydrase domain.

[0061] A protein-modulating polypeptide can comprise the amino acid sequence set forth in SEQ ID NO:114. Alternatively, a protein-modulating polypeptide can be a homolog, ortholog, or variant of the polypeptide having the amino acid sequence set forth in SEQ ID NO:114. For example, a protein-modulating polypeptide can have an amino acid sequence with at least 40% sequence identity, e.g., 41%, 45%, 50%, 55%, 60%, 65%, 70%, 75%, 80%, 85%, 90%, 95%, 97%, 98%, or 99% sequence identity, to the amino acid sequence set forth in SEQ ID NO:114.

[0062] Amino acid sequences of homologs and/or orthologs of the polypeptide having the amino acid sequence set forth in SEQ ID NO:114 are provided in FIGS. 5A-5D and in the sequence listing. For example, the alignment in FIGS. 5A-5D provides the amino acid sequences of Ceres CLONE ID 97982 (SEQ ID NO:114), gi|46917479 (SEQ ID NO:172), gi|75298155 (SEQ ID NO:173), gi|71608998 (SEQ ID NO:220), Ceres CLONE ID 1938642 (SEQ ID NO:222), Ceres ANNOT ID 1488622 (SEQ ID NO:224), Ceres CLONE ID 593224 (SEQ ID NO:230), Ceres ANNOT ID 6014891 (SEQ ID NO:232), Ceres CLONE ID 686770 (SEQ ID NO:236), Ceres CLONE ID 1060795 (SEQ ID NO:238), gi|152955979 (SEQ ID NO:239), Ceres CLONE ID 1913328 (SEQ ID NO:241), gi|125561861 (SEQ ID NO:244), gi|42408633 (SEQ ID NO:245), and gi|7533036 (SEQ ID NO:246). Other homologs and/or orthologs of SEQ ID NO:114 include Ceres ANNOT ID 1462112 (SEQ ID NO:226), Ceres ANNOT ID 1515413 (SEQ ID NO:228), Ceres ANNOT ID 6014889 (SEQ ID NO:234), Ceres CLONE ID 2017488 (SEQ ID NO:243), and gi|7330291 (SEQ ID NO:247).

[0063] In some cases, a protein-modulating polypeptide includes a polypeptide having at least 80% sequence identity, e.g., 80%, 85%, 90%, 95%, 97%, 98%, or 99% sequence identity, to an amino acid sequence corresponding to SEQ ID NO:172, SEQ ID NO:173, SEQ ID NO:220, SEQ ID NO:222, SEQ ID NO:224, SEQ ID NO:226, SEQ ID NO:228, SEQ ID NO:230, SEQ ID NO:232, SEQ ID NO:234, SEQ ID NO:236, SEQ ID NO:238, SEQ ID NO:239, SEQ ID NO:241, SEQ ID NO:243, SEQ ID NO:244, SEQ ID NO:245, SEQ ID NO:246, or SEQ ID NO:247.

[0064] A protein-modulating polypeptide can contain a DnaJ domain. The DnaJ domain (J-domain) is associated with a chaperone (protein folding) system. The prokaryotic heat shock protein DnaJ interacts with the chaperone hsp70-like DnaK protein. The DnaJ protein consists of an N-terminal conserved domain (J domain) of about 70 amino acids, a glycine-rich region (G-domain) of about 30 residues, a central domain containing four repeats of a CXXCXGXG motif (CRR-domain), and a C-terminal region of 120 to 170 residues. It is thought that the J-domain of DnaJ mediates the interaction with the DnaK protein. The J-domain of DnaJ consists of four helices, the second of which has a charged surface including at least one pair of basic residues that is essential for interaction with the ATPase domain of Hsp70. The J- and CRR-domains are found in many prokaryotic and eukaryotic polypeptides, either together or separately. The T-antigens, for example, are reported to contain DnaJ domains. In yeast, J-domains have been classified into three groups; the class III proteins are functionally distinct and do not appear to act as molecular chaperones.

[0065] A protein-modulating polypeptide can contain a CSL zinc finger domain. The CSL zinc finger domain is a zinc binding motif that contains four cysteine residues that chelate zinc and is often found associated with the DnaJ domain. The CSL zinc finger domain also can be found in DPH3 and DPH4, two proteins that are involved in the biosynthesis of diphthamide, a post-translationally modified histidine residue found only in translation elongation factor 2 (eEF-2). It is conserved from archaea to humans and serves as the target for diphteria toxin and Pseudomonas exotoxin A. These two toxins catalyze the transfer of ADP-ribose to diphtamide on eEF-2, thus inactivating eEF-2, halting cellular protein synthesis, and causing cell death. See Collier (Toxicon. 2001 39(11):1793-803). SEQ ID NO:118 sets forth the amino acid sequence of an Arabidopsis clone, identified herein as Ceres ANNOT ID no. 564367 (SEQ ID NO:117), that is predicted to encode a polypeptide containing a DnaJ domain and a CSL zinc finger domain.

[0066] A protein-modulating polypeptide can comprise the amino acid sequence set forth in SEQ ID NO:118. Alternatively, a protein-modulating polypeptide can be a homolog, ortholog, or variant of the polypeptide having the amino acid sequence set forth in SEQ ID NO:118. For example, a protein-modulating polypeptide can have an amino acid sequence with at least 45% sequence identity, e.g., 46%, 50%, 55%, 60%, 65%, 70%, 75%, 80%, 85%, 90%, 95%, 97%, 98%, or 99% sequence identity, to the amino acid sequence set forth in SEQ ID NO:118.

[0067] Amino acid sequences of homologs and/or orthologs of the polypeptide having the amino acid sequence set forth in SEQ ID NO:118 are provided in FIG. 3 and in the sequence listing. For example, the alignment in FIG. 3 provides the amino acid sequences of Lead Ceres ANNOT ID 564367 (SEQ ID NO:118), CeresClone:594825 (SEQ ID NO:119), CeresAnnot:1486448 (SEQ ID NO:125), and gi|115479583 (SEQ ID NO:126). Other homologs and/or orthologs of SEQ ID NO:118 include Ceres ANNOT ID 1539862 (SEQ ID NO:122), Ceres ANNOT ID 6068784 (SEQ ID NO:136), Ceres ANNOT ID 6041876 (SEQ ID NO:138), Ceres CLONE ID 333468 (SEQ ID NO:140), and gi/115476866 (SEQ ID NO:141).

[0068] In some cases, a protein-modulating polypeptide includes a polypeptide having at least 80% sequence identity, e.g., 80%, 85%, 90%, 95%, 97%, 98%, or 99% sequence identity, to an amino acid sequence corresponding to SEQ ID NO:119, SEQ ID NO:122, SEQ ID NO:125, SEQ ID NO:126, SEQ ID NO:136, SEQ ID NO:138, SEQ ID NO:140, and SEQ ID NO:141. SEQ ID NO:102 and SEQ ID NO:128 set forth the amino acid sequences of DNA clones, identified herein as Ceres ANNOT ID no. 571199 (SEQ ID NO:101) and Ceres ANNOT ID no. 851745 (SEQ ID NO:127), respectively, each of which is predicted to encode a polypeptide that does not have homology to an existing protein family based on Pfam analysis.

[0069] A protein-modulating polypeptide can comprise the amino acid sequence set forth in SEQ ID NO:102 and SEQ ID NO:128. Alternatively, a protein-modulating polypeptide can be a homolog, ortholog, or variant of the polypeptide having the amino acid sequence set forth in SEQ ID NO:102 or SEQ ID NO:128. For example, a protein-modulating polypeptide can have an amino acid sequence with at least 45% sequence identity, e.g., 47%, 50%, 55%, 60%, 65%, 70%, 75%, 80%, 85%, 90%, 95%, 97%, 98%, or 99% sequence identity, to the amino acid sequence set forth in SEQ ID NO:102 or SEQ ID NO:128

[0070] Amino acid sequences of homologs and/or orthologs of the polypeptide having the amino acid sequence set forth in SEQ ID NO:102 and SEQ ID NO:128 are provided in FIG. 2A-2B and FIG. 4, respectively, and in the sequence listing. For example, the alignment in FIGS. 2A-2B provides the amino acid sequences of Lead Annot ID 571199 (SEQ ID NO:102), CeresAnnot:1469254 (SEQ ID NO:106), gi|92895842 (SEQ ID NO:107), CeresClone:1121764 (SEQ ID NO:108), gi|33146851 (SEQ ID NO:109), and CeresClone:278526 (SEQ ID NO:110). Other homologs and/or orthologs include Public GI no. 110737799 (SEQ ID NO:103).

[0071] The alignment in FIG. 4 provides the amino acid sequences of Lead Ceres ANNOT ID 851745 (SEQ ID NO:128), CeresAnnot:1455259 (SEQ ID NO:131), CeresClone:1939499 (SEQ ID NO:133), and CeresClone:605517 (SEQ ID NO:134). Other homologs and/or orthologs of SEQ ID NO:128 include Ceres ANNOT ID 6007789 (SEQ ID NO:177), Ceres CLONE ID 842076 (SEQ ID NO:179), and gi|115444077 (SEQ ID NO:180).

[0072] In some cases, a protein-modulating polypeptide includes a polypeptide having at least 80% sequence identity, e.g., 80%, 85%, 90%, 95%, 97%, 98%, or 99% sequence identity, to an amino acid sequence corresponding to SEQ ID NO:103, SEQ ID NO:106, SEQ ID NO:107, SEQ ID NO:108, SEQ ID NO:109, SEQ ID NO:110, SEQ ID NO:131, SEQ ID NO:133, SEQ ID NO:134.

[0073] A protein-modulating polypeptide can contain an adh_short domain characteristic of polypeptides in the short-chain dehydrogenases/reductases family (SDR). This is a large family of enzymes, most of which are NAD- or NADP-dependent oxidoreductases. SEQ ID NO:181 sets forth the amino acid sequence of a Zea mays clone, identified herein as full-length Ceres Clone 258034 (SEQ ID NO:248), that is predicted to encode a polypeptide containing an adh_short domain. SEQ ID NO:116 sets forth the amino acid sequence of a chimeric polypeptide. Residues 1-45 of SEQ ID NO:116 correspond to residues 1-45 of SEQ ID NO:181. Residues 46-68 of SEQ ID NO:116 correspond to the predicted read-through translational product of vector sequence.

[0074] A protein-modulating polypeptide can comprise the amino acid sequence set forth in SEQ ID NO:116 or SEQ ID NO:181. Alternatively, a protein-modulating polypeptide can be a homolog, ortholog, or variant of the polypeptide having the amino acid sequence set forth in SEQ ID NO:181. For example, a protein-modulating polypeptide can have an amino acid sequence with at least 45% sequence identity, e.g., 46%, 50%, 55%, 60%, 65%, 70%, 75%, 80%, 85%, 90%, 95%, 97%, 98%, or 99% sequence identity, to the amino acid sequence set forth in SEQ ID NO:116 or SEQ ID NO:181.

[0075] Amino acid sequences of homologs and/or orthologs of the polypeptide having the amino acid sequence set forth in SEQ ID NO:181 are provided in FIGS. 7A-7E and in the sequence listing. For example, the alignment in FIGS. 7A-7E provides the amino acid sequences of full-length Ceres CLONE ID 258034 (SEQ ID NO:181), gi|10720232 (SEQ ID NO:182), Ceres CLONE ID 1832498 (SEQ ID NO:184), gi|10720220 (SEQ ID NO:189), Ceres ANNOT ID 1470542 (SEQ ID NO:191), gi|15239574 (SEQ ID NO:194), gi|266742 (SEQ ID NO:200), gi|10720233 (SEQ ID NO:201), gi|21068893 (SEQ ID NO:202), gi|10720236 (SEQ ID NO:204), gi|90398977 (SEQ ID NO:205), Ceres ANNOT ID no. 6014695 (SEQ ID NO:207), gi|10720235 (SEQ ID NO:208), gi|58003345 (SEQ ID NO:209), gi|7330644 (SEQ ID NO:210), Ceres CLONE ID 1787867 (SEQ ID NO:212), gi|18071421 (SEQ ID NO:213), gi|116058730 (SEQ ID NO:215), gi|34915978 (SEQ ID NO:216), and gi|9587209 (SEQ ID NO:218). Other homologs and/or orthologs of SEQ ID NO:181 include Ceres CLONE ID no. 1846862 (SEQ ID NO:186), Ceres CLONE ID 1836128 (SEQ ID NO:188), Ceres ANNOT ID 1466766 (SEQ ID NO:193), gi|968975 (SEQ ID NO:195), gi|15234129 (SEQ ID NO:196), gi|79316418 (SEQ ID NO:197), gi|21593167 (SEQ ID NO:198), gi|15218860 (SEQ ID NO:199), gi|21068895 (SEQ ID NO:203), gi|10720231 (SEQ ID NO:214), gi|34915980 (SEQ ID NO:217), and gi|13699822 (SEQ ID NO:219).

[0076] In some cases, a protein-modulating polypeptide includes a polypeptide having at least 80% sequence identity, e.g., 80%, 85%, 90%, 95%, 97%, 98%, or 99% sequence identity, to an amino acid sequence corresponding to SEQ ID NO:182, SEQ ID NO:184, SEQ ID NO:186, SEQ ID NO:188, SEQ ID NO:189, SEQ ID NO:191, SEQ ID NO:193, SEQ ID NO:194, SEQ ID NO:195, SEQ ID NO:196, SEQ ID NO:197, SEQ ID NO:198, SEQ ID NO:199, SEQ ID NO:200, SEQ ID NO:201, SEQ ID NO:202, SEQ ID NO:203, SEQ ID NO:204, SEQ ID NO:205, SEQ ID NO:207, SEQ ID NO:208, SEQ ID NO:209, SEQ ID NO:210, SEQ ID NO:212, SEQ ID NO:213, SEQ ID NO:214, SEQ ID NO:215, SEQ ID NO:216, SEQ ID NO:217, or SEQ ID NO:218.

[0077] In some embodiments, a protein-modulating polypeptide is truncated at the amino- or carboxy-terminal end of a naturally occurring polypeptide. A truncated polypeptide may retain certain domains of the naturally occurring polypeptide while lacking others. Thus, length variants that are up to 5 amino acids shorter or longer typically exhibit the protein-modulating activity of a truncated polypeptide. In some embodiments, a truncated polypeptide is a dominant negative polypeptide. SEQ ID NO: 116 sets forth the amino sequence of a protein-modulating polypeptide that is truncated at the C-terminal end relative to the naturally occurring polypeptide (see SEQ ID NO:181). Expression in a plant of such a truncated polypeptide confers a difference in the level of protein in a tissue of the plant as compared to the corresponding level in tissue of a control plant that does not comprise the truncation

[0078] A protein-modulating polypeptide encoded by a recombinant nucleic acid can be a native protein-modulating polypeptide, i.e., one or more additional copies of the coding sequence for a protein-modulating polypeptide that is naturally present in the cell. Alternatively, a protein-modulating polypeptide can be heterologous to the cell, e.g., a transgenic Lycopersicon plant can contain the coding sequence for a kinase polypeptide from a Glycine plant.

[0079] A protein-modulating polypeptide can include additional amino acids that are not involved in protein modulation, and thus can be longer than would otherwise be the case. For example, a protein-modulating polypeptide can include an amino acid sequence that functions as a reporter. Such a protein-modulating polypeptide can be a fusion protein in which a green fluorescent protein (GFP) polypeptide is fused to, e.g., SEQ ID NO:112, or in which a yellow fluorescent protein (YFP) polypeptide is fused to, e.g., SEQ ID NO:118. In some embodiments, a protein-modulating polypeptide includes a purification tag, a chloroplast transit peptide, a mitochondrial transit peptide, or a leader sequence added to the amino or carboxy terminus.

[0080] Protein-modulating polypeptide candidates suitable for use in the invention can be identified by analysis of nucleotide and polypeptide sequence alignments. For example, performing a query on a database of nucleotide or polypeptide sequences can identify homologs and/or orthologs of protein-modulating polypeptides. Sequence analysis can involve BLAST, Reciprocal BLAST, or PSI-BLAST analysis of nonredundant databases using known protein-modulating polypeptide amino acid sequences. Those polypeptides in the database that have greater than 40% sequence identity can be identified as candidates for further evaluation for suitability as a protein-modulating polypeptide. Amino acid sequence similarity allows for conservative amino acid substitutions, such as substitution of one hydrophobic residue for another or substitution of one polar residue for another. If desired, manual inspection of such candidates can be carried out in order to narrow the number of candidates to be further evaluated. Manual inspection can be performed by selecting those candidates that appear to have domains suspected of being present in protein-modulating polypeptides, e.g., conserved functional domains.

[0081] The identification of conserved regions in a template or subject polypeptide can facilitate production of variants of wild type protein-modulating polypeptides. Conserved regions can be identified by locating a region within the primary amino acid sequence of a template polypeptide that is a repeated sequence, forms some secondary structure (e.g., helices and beta sheets), establishes positively or negatively charged domains, or represents a protein motif or domain. See, e.g., the Pfam web site describing consensus sequences for a variety of protein motifs and domains on the World Wide Web at sanger.ac.uk/Software/Pfam/ and pfam.janelia.org/. A description of the information included at the Pfam database is described in Sonnhammer et al., Nucl. Acids Res., 26:320-322 (1998); Sonnhammer et al., Proteins, 28:405-420 (1997); and Bateman et al., Nucl. Acids Res., 27:260-262 (1999). Amino acid residues corresponding to Pfam domains included in protein-modulating polypeptides provided herein are set forth in the sequence listing. For example, amino acid residues 158 to 296 of the amino acid sequence set forth in SEQ ID NO:96 correspond to a TLD domain, as indicated in fields <222> and <223> for SEQ ID NO:96 in the sequence listing.

[0082] Conserved regions also can be determined by aligning sequences of the same or related polypeptides from closely related species. Closely related species preferably are from the same family. In some embodiments, alignment of sequences from two different species is adequate. For example, sequences from Arabidopsis and Zea mays can be used to identify one or more conserved regions.

[0083] Typically, polypeptides that exhibit at least about 40% amino acid sequence identity are useful to identify conserved regions. Conserved regions of related polypeptides can exhibit at least 45% amino acid sequence identity (e.g., at least 50%, at least 60%, at least 70%, at least 80%, or at least 90% amino acid sequence identity). In some embodiments, a conserved region of target and template polypeptides exhibit at least 92%, 94%, 96%, 98%, or 99% amino acid sequence identity. Amino acid sequence identity can be deduced from amino acid or nucleotide sequences. In certain cases, highly conserved domains have been identified within protein-modulating polypeptides. These conserved regions can be useful in identifying functionally similar (orthologous) protein-modulating polypeptides.

[0084] In some instances, suitable protein-modulating polypeptides can be synthesized on the basis of consensus functional domains and/or conserved regions in polypeptides that are homologous protein-modulating polypeptides. Domains are groups of substantially contiguous amino acids in a polypeptide that can be used to characterize protein families and/or parts of proteins. Such domains have a “fingerprint” or “signature” that can comprise conserved (1) primary sequence, (2) secondary structure, and/or (3) three-dimensional conformation. Generally, domains are correlated with specific in vitro and/or in vivo activities. A domain can have a length of from 10 amino acids to 400 amino acids, e.g., 10 to 50 amino acids, or 25 to 100 amino acids, or 35 to 65 amino acids, or 35 to 55 amino acids, or 45 to 60 amino acids, or 200 to 300 amino acids, or 300 to 400 amino acids.

[0085] Representative homologs and/or orthologs of protein-modulating polypeptides are shown in FIGS. 1-7. Each Figure represents an alignment of the amino acid sequence of a protein-modulating polypeptide with the amino acid sequences of corresponding homologs and/or orthologs. Amino acid sequences of protein-modulating polypeptides and their corresponding homologs and/or orthologs have been aligned to identify conserved amino acids as shown in FIGS. 1-7. A dash in an aligned sequence represents a gap, i.e., a lack of an amino acid at that position. Identical amino acids or conserved amino acid substitutions among aligned sequences are identified by boxes.

[0086] The identification of conserved regions in a protein-modulating polypeptide facilitates production of variants of protein-modulating polypeptides. Variants of protein-modulating polypeptides typically have 10 or fewer conservative amino acid substitutions within the primary amino acid sequence, e.g., 7 or fewer conservative amino acid substitutions, 5 or fewer conservative amino acid substitutions, or between 1 and 5 conservative substitutions. Useful polypeptides can be constructed based on the conserved regions in FIG. 1, FIG. 2, FIG. 3, FIG. 4, FIG. 5, FIG. 6, or FIG. 7. Such a polypeptide includes the conserved regions arranged in the order depicted in the Figure from amino-terminal end to carboxy-terminal end. Such a polypeptide may also include zero, one, or more than one amino acid in positions marked by dashes. When no amino acids are present at positions marked by dashes, the length of such a polypeptide is the sum of the amino acid residues in all conserved regions. When amino acids are present at all positions marked by dashes, such a polypeptide has a length that is the sum of the amino acid residues in all conserved regions and all dashes.

[0087] Consensus domains and conserved regions can be identified by homologous polypeptide sequence analysis as described above. The suitability of polypeptides for use as protein-modulating polypeptides can be evaluated by functional complementation studies.

[0088] A protein-modulating polypeptide also can be a fragment of a naturally occurring protein-modulating polypeptide. In certain cases, such as transcription factor protein-modulating polypeptides, a fragment can comprise the DNA-binding and transcription-regulating domains of the naturally occurring protein-modulating polypeptide. In some cases, such as enzyme protein-modulating polypeptides, a fragment can comprise the catalytic domain of the naturally occurring protein-modulating polypeptide.

[0089] Useful protein-modulating polypeptides also can include those that fit a Hidden Markov Model based on the polypeptides set forth in any one of FIGS. 1-7. A Hidden Markov Model (HMM) is a statistical model of a consensus sequence for a group of functional homologs. See, Durbin et al., Biological Sequence Analysis: Probabilistic Models of Proteins and Nucleic Acids, Cambridge University Press, Cambridge, UK (1998). An HMM is generated by the program HMMER 2.3.2 with default program parameters, using the sequences of the group of functional homologs as input. The multiple sequence alignment is generated by ProbCons (Do et al., Genome Res., 15(2):330-40 (2005)) version 1.11 using a set of default parameters: -c, —consistency REPS of 2; -ir, —iterative-refinement REPS of 100; -pre, —pre-training REPS of 0. ProbCons is a public domain software program provided by Stanford University.

[0090] The default parameters for building an HMM (hmmbuild) are as follows: the default “architecture prior” (archpri) used by MAP architecture construction is 0.85, and the default cutoff threshold (idlevel) used to determine the effective sequence number is 0.62. HMMER 2.3.2 was released Oct. 3, 2003 under a GNU general public license, and is available from various sources on the World Wide Web such as hmmer.janelia.org; hmmer.wustl.edu; and fr.com/hmmer232/. Hmmbuild outputs the model as a text file.

[0091] The HMM for a group of functional homologs can be used to determine the likelihood that a candidate protein-modulating polypeptide sequence is a better fit to that particular HMM than to a null HMM generated using a group of sequences that are not structurally or functionally related. The likelihood that a candidate polypeptide sequence is a better fit to an HMM than to a null HMM is indicated by the HMM bit score, a number generated when the candidate sequence is fitted to the HMM profile using the HMMER hmmsearch program. The following default parameters are used when running hmmsearch: the default E-value cutoff (E) is 10.0, the default bit score cutoff (T) is negative infinity, the default number of sequences in a database (Z) is the real number of sequences in the database, the default E-value cutoff for the per-domain ranked hit list (domE) is infinity, and the default bit score cutoff for the per-domain ranked hit list (domT) is negative infinity. A high HMM bit score indicates a greater likelihood that the candidate sequence carries out one or more of the biochemical or physiological function(s) of the polypeptides used to generate the HMM. A high HMM bit score is at least 20, and often is higher. Slight variations in the HMM bit score of a particular sequence can occur due to factors such as the order in which sequences are processed for alignment by multiple sequence alignment algorithms such as the ProbCons program. Nevertheless, such HMM bit score variation is minor.

[0092] The protein-modulating polypeptides discussed herein fit the indicated HMM with an HMM bit score greater than 20 (e.g., greater than 30, 40, 50, 60, 70, 80, 90, 100, 200, 300, 400, or 500). In some embodiments, the HMM bit score of a protein-modulating polypeptide discussed below is about 50%, 60%, 70%, 80%, 90%, or 95% of the HMM bit score of a functional homolog provided in one of FIGS. 1-7. In some embodiments, a protein-modulating polypeptide discussed herein fits the indicated HMM with an HMM bit score greater than 20, and has a conserved domain e.g., a PFAM domain indicative of a protein-modulating polypeptide discussed herein. In some embodiments, a protein-modulating polypeptide discussed herein fits the indicated HMM with an HMM bit score greater than 20, and has 70% or greater sequence identity (e.g., 75%, 76%, 77%, 78%, 79%, 80%, 81%, 82%, 83%, 84%, 85%, 86%, 87%, 88%, 89%, 90%, 91%, 92%, 93%, 94%, 95%, 96%, 97%, 98%, 99%, or 100% sequence identity) to an amino acid sequence shown in any one of FIGS. 1-7.

[0093] For example, a protein-modulating polypeptide can fit an HMM generated using the amino acid sequences set forth in FIG. 1 with an HMM bit score that is greater than about 820 (e.g., greater than about 844, 875, 900, 925, or 930). In some cases, a protein-modulating polypeptide can fit an HMM generated using the amino acid sequences set forth in FIG. 2 with an HMM bit score that is greater than about 680 (e.g., greater than about 690, 700, 720, 730, 740, 750, 775, 800, 825, 850, 870, 875, 890, or 895). In some cases, a protein-modulating polypeptide can fit an HMM generated using the amino acid sequences set forth in FIG. 3 with an HMM bit score that is greater than about 225 (e.g., greater than about 230, 235, 250, 275, 300, 325, 330, 340, 345, 375, 400, 425, 450, 475, 500, 525, 550, 560, 575, or 585). In some cases, a protein-modulating polypeptide can fit an HMM generated using the amino acid sequences set forth in FIG. 4 with an HMM bit score that is greater than about 800 (e.g., greater than about 805, 810, 815, 820, 825, 830, 840, 850, or 860). In some cases, a protein-modulating polypeptide can fit an HMM generated using the amino acid sequences set forth in FIG. 5 with an HMM bit score that is greater than about 500 (e.g., greater than about 510, 525, 550, 575, 600, 625, 650, 675, or 700). In some cases, a protein-modulating polypeptide can fit an HMM generated using the amino acid sequences set forth in FIG. 6 with an HMM bit score that is greater than about 1140 (e.g., greater than about 1150, 1200, 1250, 1300, 1350, 1375, 1400, 1450, 1475, 1500, 1550, 1575, 1600, 1650, 1675, 1700, 1750, 1775, 1800, 1850, 1875, 1900, 1950, 1975, 2000, 2010, or 2015). In some cases, a protein-modulating polypeptide can fit an HMM generated using the amino acid sequences set forth in FIG. 7 with an HMM bit score that is greater than about 840 (e.g., greater than about 845, 850, 875, 900, 925, 950, 975, 1000, 1025, 1050, 1075, 1100, 1125, 1130, or 1135).

[0094] Nucleic Acids

[0095] The terms “nucleic acid” and “polynucleotide” are used interchangeably herein, and refer to both RNA and DNA, including cDNA, genomic DNA, synthetic DNA, and DNA (or RNA) containing nucleic acid analogs. Polynucleotides can have any three-dimensional structure. A nucleic acid can be double-stranded or single-stranded (i.e., a sense strand or an antisense strand). Non-limiting examples of polynucleotides include genes, gene fragments, exons, introns, messenger RNA (mRNA), transfer RNA, ribosomal RNA, siRNA, micro-RNA, ribozymes, cDNA, recombinant polynucleotides, branched polynucleotides, plasmids, vectors, isolated DNA of any sequence, isolated RNA of any sequence, nucleic acid probes, and primers, as well as nucleic acid analogs.

[0096] Nucleic acids described herein include protein-modulating nucleic acids. Protein-modulating nucleic acids can be effective to modulate protein levels when transcribed in a plant or plant cell. A protein-modulating nucleic acid can comprise the nucleotide sequence set forth in SEQ ID NO:115. Alternatively, a protein-modulating nucleic acid can be a variant of the nucleic acid having the nucleotide sequence set forth in SEQ ID NO:115. For example, a protein-modulating nucleic acid can have a nucleotide sequence with at least 80% sequence identity, e.g., 81%, 85%, 90%, 95%, 97%, 98%, or 99% sequence identity, to the nucleotide sequence set forth in SEQ ID NO:115.

[0097] An “isolated nucleic acid” can be, for example, a naturally-occurring DNA molecule, provided one of the nucleic acid sequences normally found immediately flanking that DNA molecule in a naturally-occurring genome is removed or absent. Thus, an isolated nucleic acid includes, without limitation, a DNA molecule that exists as a separate molecule, independent of other sequences (e.g., a chemically synthesized nucleic acid, or a cDNA or genomic DNA fragment produced by the polymerase chain reaction (PCR) or restriction endonuclease treatment). An isolated nucleic acid also refers to a DNA molecule that is incorporated into a vector, an autonomously replicating plasmid, a virus, or into the genomic DNA of a prokaryote or eukaryote. In addition, an isolated nucleic acid can include an engineered nucleic acid such as a DNA molecule that is part of a hybrid or fusion nucleic acid. A nucleic acid existing among hundreds to millions of other nucleic acids within, for example, cDNA libraries or genomic libraries, or gel slices containing a genomic DNA restriction digest, is not to be considered an isolated nucleic acid.

[0098] Isolated nucleic acid molecules can be produced by standard techniques. For example, polymerase chain reaction (PCR) techniques can be used to obtain an isolated nucleic acid containing a nucleotide sequence described herein. PCR can be used to amplify specific sequences from DNA as well as RNA, including sequences from total genomic DNA or total cellular RNA. Various PCR methods are described, for example, in PCR Primer: A Laboratory Manual, Dieffenbach and Dveksler, eds., Cold Spring Harbor Laboratory Press, 1995. Generally, sequence information from the ends of the region of interest or beyond is employed to design oligonucleotide primers that are identical or similar in sequence to opposite strands of the template to be amplified. Various PCR strategies also are available by which site-specific nucleotide sequence modifications can be introduced into a template nucleic acid. Isolated nucleic acids also can be chemically synthesized, either as a single nucleic acid molecule (e.g., using automated DNA synthesis in the 3′ to 5′ direction using phosphoramidite technology) or as a series of oligonucleotides. For example, one or more pairs of long oligonucleotides (e.g., >100 nucleotides) can be synthesized that contain the desired sequence, with each pair containing a short segment of complementarity (e.g., about 15 nucleotides) such that a duplex is formed when the oligonucleotide pair is annealed. DNA polymerase is used to extend the oligonucleotides, resulting in a single, double-stranded nucleic acid molecule per oligonucleotide pair, which then can be ligated into a vector. Isolated nucleic acids of the invention also can be obtained by mutagenesis of, e.g., a naturally occurring DNA.

[0099] The term “percent sequence identity” refers to the degree of identity between any given query sequence, e.g., SEQ ID NO:102, and a subject sequence. A subject sequence typically has a length that is from 80 percent to 200 percent of the length of the query sequence, e.g., 82, 85, 87, 89, 90, 93, 95, 97, 99, 100, 105, 110, 115, 120, 130, 140, 150, 160, 170, 180, 190, or 200 percent of the length of the query sequence. A percent identity for any subject nucleic acid or polypeptide relative to a query nucleic acid or polypeptide can be determined as follows. A query sequence (e.g., a nucleic acid sequence or an amino acid sequence) is aligned to one or more subject sequences using the computer program ClustalW (version 1.83, default parameters), which allows alignments of nucleic acid or polypeptide sequences to be carried out across their entire length (global alignment). Chema et al., Nucleic Acids Res., 31(13):3497-500 (2003).

[0100] ClustalW calculates the best match between a query and one or more subject sequences, and aligns them so that identities, similarities and differences can be determined. Gaps of one or more residues can be inserted into a query sequence, a subject sequence, or both, to maximize sequence alignments. For fast pairwise alignment of nucleic acid sequences, the following default parameters are used: word size: 2; window size: 4; scoring method: percentage; number of top diagonals: 4; and gap penalty: 5. For multiple alignment of nucleic acid sequences, the following parameters are used: gap opening penalty: 10.0; gap extension penalty: 5.0; and weight transitions: yes. For fast pairwise alignment of protein sequences, the following parameters are used: word size: 1; window size: 5; scoring method: percentage; number of top diagonals: 5; gap penalty: 3. For multiple alignment of protein sequences, the following parameters are used: weight matrix: blosum; gap opening penalty: 10.0; gap extension penalty: 0.05; hydrophilic gaps: on; hydrophilic residues: Gly, Pro, Ser, Asn, Asp, Gln, Glu, Arg, and Lys; residue-specific gap penalties: on. The ClustalW output is a sequence alignment that reflects the relationship between sequences. ClustalW can be run, for example, at the Baylor College of Medicine Search Launcher site (searchlauncher.bcm.tmc.edu/multi-align/multi-align.html) and at the European Bioinformatics Institute site on the World Wide Web (ebi.ac.uk/clustalw).

[0101] To determine percent identity of a subject nucleic acid or amino acid sequence to a query sequence, the sequences are aligned using ClustalW, the number of identical matches in the alignment is divided by the length of the query sequence, and the result is multiplied by 100. It is noted that the percent identity value can be rounded to the nearest tenth. For example, 78.11, 78.12, 78.13, and 78.14 are rounded down to 78.1, while 78.15, 78.16, 78.17, 78.18, and 78.19 are rounded up to 78.2.

[0102] The term “exogenous” with respect to a nucleic acid indicates that the nucleic acid is part of a recombinant nucleic acid construct, or is not in its natural environment. For example, an exogenous nucleic acid can be a sequence from one species introduced into another species, i.e., a heterologous nucleic acid. Typically, such an exogenous nucleic acid is introduced into the other species via a recombinant nucleic acid construct. An exogenous nucleic acid can also be a sequence that is native to an organism and that has been reintroduced into cells of that organism. An exogenous nucleic acid that includes a native sequence can often be distinguished from the naturally occurring sequence by the presence of non-natural sequences linked to the exogenous nucleic acid, e.g., non-native regulatory sequences flanking a native sequence in a recombinant nucleic acid construct. In addition, stably transformed exogenous nucleic acids typically are integrated at positions other than the position where the native sequence is found. It will be appreciated that an exogenous nucleic acid may have been introduced into a progenitor and not into the cell under consideration. For example, a transgenic plant containing an exogenous nucleic acid can be the progeny of a cross between a stably transformed plant and a non-transgenic plant. Such progeny are considered to contain the exogenous nucleic acid.

[0103] Recombinant constructs are also provided herein and can be used to transform plants or plant cells in order to modulate protein levels. A recombinant nucleic acid construct can comprise a nucleic acid encoding a protein-modulating polypeptide as described herein, operably linked to a regulatory region suitable for expressing the protein-modulating polypeptide in the plant or cell. Thus, a nucleic acid can comprise a coding sequence that encodes any of the protein-modulating polypeptides as set forth in SEQ ID NOs:96-98, SEQ ID NO:100, SEQ ID NOs:102-103, SEQ ID NOs:106-110, SEQ ID NO:112, SEQ ID NO:114, SEQ ID NO:116, SEQ ID NOs:118-119, SEQ ID NO:122, SEQ ID NOs:125-126, SEQ ID NO:128, SEQ ID NO:131, SEQ ID NOs:133-134, SEQ ID NO:136, SEQ ID NO:138, SEQ ID NOs:140-141, SEQ ID NOs:143-146, SEQ ID NO:148, SEQ ID NO:150, SEQ ID NO:152, SEQ ID NO:154, SEQ ID NOs:156-157, SEQ ID NO:159, SEQ ID NO:161, SEQ ID NO:163, SEQ ID NO:165, SEQ ID NOs:167-175, SEQ ID NO:177, SEQ ID NOs:179-182, SEQ ID NO:184, SEQ ID NO:186, SEQ ID NO:186, SEQ ID NOs:188-189, SEQ ID NO:191, SEQ ID NOs:193-205, SEQ ID NOs:207-210, SEQ ID NOs:212-220, SEQ ID NO:222, SEQ ID NO:224, SEQ ID NO:226, SEQ ID NO:228, SEQ ID NO:230, SEQ ID NO:232, SEQ ID NO:234, SEQ ID NO:236, SEQ ID NOs:238-239, SEQ ID NO:241, and SEQ ID NOs:243-247.

[0104] Examples of nucleic acids encoding protein-modulating polypeptides are set forth in SEQ ID NO:95, SEQ ID NO:99, SEQ ID NO:101, SEQ ID NO:104, SEQ ID NO:105, SEQ ID NO:111, SEQ ID NO:113, SEQ ID NO:115, SEQ ID NO:117, SEQ ID NO:120, SEQ ID NO:121, SEQ ID NO:123, SEQ ID NO:124, SEQ ID NO:127, SEQ ID NO:129, SEQ ID NO:130, SEQ ID NO:132, SEQ ID NO:135, SEQ ID NO:137, SEQ ID NO:139, SEQ ID NO:142, SEQ ID NO:147, SEQ ID NO:149, SEQ ID NO:151, SEQ ID NO:153, SEQ ID NO:155, SEQ ID NO:158, SEQ ID NO:160, SEQ ID NO:162, SEQ ID NO:164, SEQ ID NO:166, SEQ ID NO:176, SEQ ID NO:178, SEQ ID NO:183, SEQ ID NO:187, SEQ ID NO:190, SEQ ID NO:192, SEQ ID NO:206, SEQ ID NO:211, SEQ ID NO:221, SEQ ID NO:225, SEQ ID NO:227, SEQ ID NO:292, SEQ ID NO:231, SEQ ID NO:233, SEQ ID NO:235, SEQ ID NO:237, SEQ ID NO:237, SEQ ID NO:240, SEQ ID NO:242, and SEQ ID NO:248.

[0105] A nucleic acid also can be a fragment that is at least 40% (e.g., at least 45, 50, 55, 60, 65, 70, 75, 80, 85, 90, 95, or 99%) of the length of the nucleic acid set forth in SEQ ID NO:95, SEQ ID NO:99, SEQ ID NO:101, SEQ ID NO:104, SEQ ID NO:105, SEQ ID NO:111, SEQ ID NO:113, SEQ ID NO:115, SEQ ID NO:117, SEQ ID NO:120, SEQ ID NO:121, SEQ ID NO:123, SEQ ID NO:124, SEQ ID NO:127, SEQ ID NO:129, SEQ ID NO:130, SEQ ID NO:132, SEQ ID NO:135, SEQ ID NO:137, SEQ ID NO:139, SEQ ID NO:142, SEQ ID NO:147, SEQ ID NO:149, SEQ ID NO:151, SEQ ID NO:153, SEQ ID NO:155, SEQ ID NO:158, SEQ ID NO:160, SEQ ID NO:162, SEQ ID NO:164, SEQ ID NO:166, SEQ ID NO:176, SEQ ID NO:178, SEQ ID NO:183, SEQ ID NO:187, SEQ ID NO:190, SEQ ID NO:192, SEQ ID NO:206, SEQ ID NO:211, SEQ ID NO:221, SEQ ID NO:225, SEQ ID NO:227, SEQ ID NO:292, SEQ ID NO:231, SEQ ID NO:233, SEQ ID NO:235, SEQ ID NO:237, SEQ ID NO:237, SEQ ID NO:240, SEQ ID NO:242, and SEQ ID NO:248.

[0106] SEQ ID NO:95 is predicted to encode a polypeptide having the amino acid sequence set forth in SEQ ID NO:96. SEQ ID NO:99 is predicted to encode a polypeptide having the amino acid sequence set forth in SEQ ID NO:100. SEQ ID NO:101 is predicted to encode a polypeptide having the amino acid sequence set forth in SEQ ID NO:102 SEQ ID NO:104 is predicted to encode the polypeptide having the amino acid sequence set forth in SEQ ID NO:105. SEQ ID NO:111 is predicted to encode the polypeptide having the amino acid sequence set forth in SEQ ID NO:112. SEQ ID NO:113 is predicted to encode the polypeptide having the amino acid sequence set forth in SEQ ID NO:114. SEQ ID NO:115 is predicted to encode the polypeptide having the amino acid sequence set forth in SEQ ID NO:116. SEQ ID NO:117 is predicted to encode the polypeptide having the amino acid sequence set forth in SEQ ID NO:118. SEQ ID NO:121 is predicted to encode the polypeptide having the amino acid sequence set forth in SEQ ID NO:122. SEQ ID NO:124 is predicted to encode the polypeptide having the amino acid sequence set forth in SEQ ID NO:125. SEQ ID NO:127 is predicted to encode the polypeptide having the amino acid sequence set forth in SEQ ID NO:128. SEQ ID NO:130 is predicted to encode the polypeptide having the amino acid sequence set forth in SEQ ID NO:131. SEQ ID NO:132 is predicted to encode the polypeptide having the amino acid sequence set forth in SEQ ID NO:133. SEQ ID NO:135 is predicted to encode the polypeptide having the amino acid sequence set forth in SEQ ID NO:136. SEQ ID NO:137 is predicted to encode the polypeptide having the amino acid sequence set forth in SEQ ID NO:138. SEQ ID NO:139 is predicted to encode the polypeptide having the amino acid sequence set forth in SEQ ID NO:140. SEQ ID NO:142 is predicted to encode the polypeptide having the amino acid sequence set forth in SEQ ID NO:143. SEQ ID NO:147 is predicted to encode the polypeptide having the amino acid sequence set forth in SEQ ID NO:148. SEQ ID NO:149 is predicted to encode the polypeptide having the amino acid sequence set forth in SEQ ID NO:150. SEQ ID NO:151 is predicted to encode the polypeptide having the amino acid sequence set forth in SEQ ID NO:152. SEQ ID NO:153 is predicted to encode the polypeptide having the amino acid sequence set forth in SEQ ID NO:154. SEQ ID NO:155 is predicted to encode the polypeptide having the amino acid sequence set forth in SEQ ID NO:156. SEQ ID NO:158 is predicted to encode the polypeptide having the amino acid sequence set forth in SEQ ID NO:159. SEQ ID NO:160 is predicted to encode the polypeptide having the amino acid sequence set forth in SEQ ID NO:161. SEQ ID NO:162 is predicted to encode the polypeptide having the amino acid sequence set forth in SEQ ID NO:163. SEQ ID NO:164 is predicted to encode the polypeptide having the amino acid sequence set forth in SEQ ID NO:165. SEQ ID NO:166 is predicted to encode the polypeptide having the amino acid sequence set forth in SEQ ID NO:167. SEQ ID NO:176 is predicted to encode the polypeptide having the amino acid sequence set forth in SEQ ID NO:177. SEQ ID NO:178 is predicted to encode the polypeptide having the amino acid sequence set forth in SEQ ID NO:179. SEQ ID NO:248 is predicted to encode the polypeptide having the amino acid sequence set forth in SEQ ID NO:181. SEQ ID NO:183 is predicted to encode the polypeptide having the amino acid sequence set forth in SEQ ID NO:184. SEQ ID NO:185 is predicted to encode the polypeptide having the amino acid sequence set forth in SEQ ID NO:186. SEQ ID NO:187 is predicted to encode the polypeptide having the amino acid sequence set forth in SEQ ID NO:188. SEQ ID NO:190 is predicted to encode the polypeptide having the amino acid sequence set forth in SEQ ID NO:191. SEQ ID NO:192 is predicted to encode the polypeptide having the amino acid sequence set forth in SEQ ID NO:193. SEQ ID NO:206 is predicted to encode the polypeptide having the amino acid sequence set forth in SEQ ID NO:207. SEQ ID NO:211 is predicted to encode the polypeptide having the amino acid sequence set forth in SEQ ID NO:212. SEQ ID NO:221 is predicted to encode the polypeptide having the amino acid sequence set forth in SEQ ID NO:222. SEQ ID NO:223 is predicted to encode the polypeptide having the amino acid sequence set forth in SEQ ID NO:224. SEQ ID NO:225 is predicted to encode the polypeptide having the amino acid sequence set forth in SEQ ID NO:226. SEQ ID NO:227 is predicted to encode the polypeptide having the amino acid sequence set forth in SEQ ID NO:228. SEQ ID NO:229 is predicted to encode the polypeptide having the amino acid sequence set forth in SEQ ID NO:230. SEQ ID NO:231 is predicted to encode the polypeptide having the amino acid sequence set forth in SEQ ID NO:232. SEQ ID NO:233 is predicted to encode the polypeptide having the amino acid sequence set forth in SEQ ID NO:234. SEQ ID NO:236 is predicted to encode the polypeptide having the amino acid sequence set forth in SEQ ID NO:237. SEQ ID NO:240 is predicted to encode the polypeptide having the amino acid sequence set forth in SEQ ID NO:241. SEQ ID NO:242 is predicted to encode the polypeptide having the amino acid sequence set forth in SEQ ID NO:243.

[0107] In some cases, a recombinant nucleic acid construct can include a nucleic acid comprising less than the full-length of a coding sequence. Typically, such a construct also includes a regulatory region operably linked to the protein-modulating nucleic acid.

[0108] It will be appreciated that a number of nucleic acids can encode a polypeptide having a particular amino acid sequence. The degeneracy of the genetic code is well known to the art; i.e., for many amino acids, there is more than one nucleotide triplet that serves as the codon for the amino acid. For example, codons in the coding sequence for a given protein-modulating polypeptide can be modified such that optimal expression in a particular plant species is obtained, using appropriate codon bias tables for that species.

[0109] Vectors containing nucleic acids such as those described herein also are provided. A “vector” is a replicon, such as a plasmid, phage, or cosmid, into which another DNA segment may be inserted so as to bring about the replication of the inserted segment. Generally, a vector is capable of replication when associated with the proper control elements. Suitable vector backbones include, for example, those routinely used in the art such as plasmids, viruses, artificial chromosomes, BACs, YACs, or PACs. The term “vector” includes cloning and expression vectors, as well as viral vectors and integrating vectors. An “expression vector” is a vector that includes a regulatory region. Suitable expression vectors include, without limitation, plasmids and viral vectors derived from, for example, bacteriophage, baculoviruses, and retroviruses. Numerous vectors and expression systems are commercially available from such corporations as Novagen (Madison, Wis.), Clontech (Palo Alto, Calif.), Stratagene (La Jolla, Calif.), and Invitrogen/Life Technologies (Carlsbad, Calif.).

[0110] The vectors provided herein also can include, for example, origins of replication, scaffold attachment regions (SARs), and/or markers. A marker gene can confer a selectable phenotype on a plant cell. For example, a marker can confer biocide resistance, such as resistance to an antibiotic (e.g., kanamycin, G418, bleomycin, or hygromycin), or an herbicide (e.g., chlorosulfuron or phosphinothricin). In addition, an expression vector can include a tag sequence designed to facilitate manipulation or detection (e.g., purification or localization) of the expressed polypeptide. Tag sequences, such as green fluorescent protein (GFP), glutathione S-transferase (GST), polyhistidine, c-myc, hemagglutinin, or Flag™ tag (Kodak, New Haven, Conn.) sequences typically are expressed as a fusion with the encoded polypeptide. Such tags can be inserted anywhere within the polypeptide, including at either the carboxyl or amino terminus.

[0111] Regulatory Regions

[0112] The term “regulatory region” refers to a nucleic acid having nucleotide sequences that influence transcription or translation initiation and rate, and stability and/or mobility of a transcription or translation product. Regulatory regions include, without limitation, promoter sequences, enhancer sequences, response elements, protein recognition sites, inducible elements, protein binding sequences, 5′ and 3′ untranslated regions (UTRs), transcriptional start sites, termination sequences, polyadenylation sequences, introns, and combinations thereof.

[0113] As used herein, the term “operably linked” refers to positioning of a regulatory region and a sequence to be transcribed in a nucleic acid so as to influence transcription or translation of such a sequence. For example, to bring a coding sequence under the control of a regulatory region, the translation initiation site of the translational reading frame of the polypeptide is typically positioned between one and about fifty nucleotides downstream of the regulatory region. A regulatory region can, however, be positioned as much as about 5,000 nucleotides upstream of the translation initiation site, or about 2,000 nucleotides upstream of the transcription start site. A regulatory region typically comprises at least a core (basal) promoter. A regulatory region also may include at least one control element, such as an enhancer sequence, an upstream element or an upstream activation region (UAR). For example, a suitable enhancer is a cis-regulatory element (−212 to −154) from the upstream region of the octopine synthase (ocs) gene. Fromm et al., The Plant Cell, 1:977-984 (1989). The choice of regulatory regions to be included depends upon several factors, including, but not limited to, efficiency, selectability, inducibility, desired expression level, and cell- or tissue-preferential expression. It is a routine matter for one of skill in the art to modulate the expression of a coding sequence by appropriately selecting and positioning regulatory regions relative to the coding sequence.

[0114] Some suitable regulatory regions initiate transcription only, or predominantly, in certain cell types. For example, a promoter that is active predominantly in a reproductive tissue (e.g., fruit, ovule, pollen, pistils, female gametophyte, egg cell, central cell, nucellus, suspensor, synergid cell, flowers, embryonic tissue, embryo sac, embryo, zygote, endosperm, integument, or seed coat) can be used. Thus, as used herein a cell type- or tissue-preferential promoter is one that drives expression preferentially in the target tissue, but may also lead to some expression in other cell types or tissues as well. Methods for identifying and characterizing regulatory regions in plant genomic DNA include, for example, those described in the following references: Jordano et al., Plant Cell, 1:855-866 (1989); Bustos et al., Plant Cell, 1:839-854 (1989); Green et al., EMBO J., 7:4035-4044 (1988); Meier et al., Plant Cell, 3:309-316 (1991); and Zhang et al., Plant Physiology, 110:1069-1079 (1996).

[0115] Examples of various classes of regulatory regions are described below. Some of the regulatory regions indicated below as well as additional regulatory regions are described in more detail in U.S. Patent Application Ser. Nos. 60/505,689; 60/518,075; 60/544,771; 60/558,869; 60/583,691; 60/619,181; 60/637,140; 60/757,544; 60/776,307; Ser. Nos. 10/957,569; 11/058,689; 11/172,703; 11/208,308; 11/274,890; 60/583,609; 60/612,891; 11/097,589; 11/233,726; 11/408,791; 11/414,142; 10/950,321; 11/360,017; PCT/US05/011105; PCT/US05/034308; PCT/US05/23639; PCT/US05/034308; PCT/US05/034343; and PCT/US06/038236; PCT/US06/040572; and PCT/US07/62762.

[0116] For example, the sequences of regulatory regions p326, YP0144, YP0190, p13879, YP0050, p32449, 21876, YP0158, YP0214, YP0380, PT0848, PT0633, YP0128, YP0275, PT0660, PT0683, PT0758, PT0613, PT0672, PT0688, PT0837, YP0092, PT0676, PT0708, YP0396, YP0007, YP0111, YP0103, YP0028, YP0121, YP0008, YP0039, YP0115, YP0119, YP0120, YP0374, YP0101, YP0102, YP0110, YP0117, YP0137, YP0285, YP0212, YP0097, YP0107, YP0088, YP0143, YP0156, PT0650, PT0695, PT0723, PT0838, PT0879, PT0740, PT0535, PT0668, PT0886, PT0585, YP0381, YP0337, PT0710, YP0356, YP0385, YP0384, YP0286, YP0377, PD1367, PT0863, PT0829, PT0665, PT0678, YP0086, YP0188, YP0263, PT0743 and YP0096 are set forth in the sequence listing of PCT/US06/040572; the sequence of regulatory region PT0625 is set forth in the sequence listing of PCT/US05/034343; the sequences of regulatory regions PT0623, YP0388, YP0087, YP0093, YP0108, YP0022 and YP0080 are set forth in the sequence listing of U.S. patent application Ser. No. 11/172,703; the sequence of regulatory region PR0924 is set forth in the sequence listing of PCT/US07/62762; and the sequences of regulatory regions p530c10, pOsFIE2-2, pOsMEA, pOsYp102, and pOsYp285 are set forth in the sequence listing of PCT/US06/038236. Nucleotide sequences of regulatory regions also are set forth in SEQ ID NOs:1-94 herein.

[0117] It will be appreciated that a regulatory region may meet criteria for one classification based on its activity in one plant species, and yet meet criteria for a different classification based on its activity in another plant species.

[0118] Broadly Expressing Promoters

[0119] A promoter can be said to be “broadly expressing” when it promotes transcription in many, but not necessarily all, plant tissues. For example, a broadly expressing promoter can promote transcription of an operably linked sequence in one or more of the shoot, shoot tip (apex), and leaves, but weakly or not at all in tissues such as roots or stems. As another example, a broadly expressing promoter can promote transcription of an operably linked sequence in one or more of the stem, shoot, shoot tip (apex), and leaves, but can promote transcription weakly or not at all in tissues such as reproductive tissues of flowers and developing seeds. Non-limiting examples of broadly expressing promoters that can be included in the nucleic acid constructs provided herein include the p326 (SEQ ID NO:76), YP0144 (SEQ ID NO:55), YP0190 (SEQ ID NO:59), p13879 (SEQ ID NO:75), YP0050 (SEQ ID NO:35), p32449 (SEQ ID NO:77), 21876 (SEQ ID NO:1), YP0158 (SEQ ID NO:57), YP0214 (SEQ ID NO:61), YP0380 (SEQ ID NO:70), PT0848 (SEQ ID NO:26), and PT0633 (SEQ ID NO:7) promoters. Additional examples include the cauliflower mosaic virus (CaMV) 35S promoter, the mannopine synthase (MAS) promoter, the 1′ or 2′ promoters derived from T-DNA of Agrobacterium tumefaciens, the figwort mosaic virus 34S promoter, actin promoters such as the rice actin promoter, and ubiquitin promoters such as the maize ubiquitin-1 promoter. In some cases, the CaMV 35S promoter is excluded from the category of broadly expressing promoters.

[0120] Root Promoters

[0121] Root-active promoters confer transcription in root tissue, e.g., root endodermis, root epidermis, or root vascular tissues. In some embodiments, root-active promoters are root-preferential promoters, i.e., confer transcription only or predominantly in root tissue. Root-preferential promoters include the YP0128 (SEQ ID NO:52), YP0275 (SEQ ID NO:63), PT0625 (SEQ ID NO:6), PT0660 (SEQ ID NO:9), PT0683 (SEQ ID NO:14), and PT0758 (SEQ ID NO:22) promoters. Other root-preferential promoters include the PT0613 (SEQ ID NO:5), PT0672 (SEQ ID NO:11), PT0688 (SEQ ID NO:15), and PT0837 (SEQ ID NO:24) promoters, which drive transcription primarily in root tissue and to a lesser extent in ovules and/or seeds. Other examples of root-preferential promoters include the root-specific subdomains of the CaMV 35S promoter (Lam et al., Proc. Natl. Acad. Sci. USA, 86:7890-7894 (1989)), root cell specific promoters reported by Conkling et al., Plant Physiol., 93:1203-1211 (1990), and the tobacco RD2 promoter.

[0122] Maturing Endosperm Promoters

[0123] In some embodiments, promoters that drive transcription in maturing endosperm can be useful. Transcription from a maturing endosperm promoter typically begins after fertilization and occurs primarily in endosperm tissue during seed development and is typically highest during the cellularization phase. Most suitable are promoters that are active predominantly in maturing endosperm, although promoters that are also active in other tissues can sometimes be used. Non-limiting examples of maturing endosperm promoters that can be included in the nucleic acid constructs provided herein include the napin promoter, the Arcelin-5 promoter, the phaseolin promoter (Bustos et al., Plant Cell, 1(9):839-853 (1989)), the soybean trypsin inhibitor promoter (Riggs et al., Plant Cell, 1(6):609-621 (1989)), the ACP promoter (Baerson et al., Plant Mol. Biol., 22(2):255-267 (1993)), the stearoyl-ACP desaturase promoter (Slocombe et al., Plant Physiol., 104(4):167-176 (1994)), the soybean α′ subunit of β-conglycinin promoter (Chen et al., Proc. Natl. Acad. Sci. USA, 83:8560-8564 (1986)), the oleosin promoter (Hong et al., Plant Mol. Biol., 34(3):549-555 (1997)), and zein promoters, such as the 15 kD zein promoter, the 16 kD zein promoter, 19 kD zein promoter, 22 kD zein promoter and 27 kD zein promoter. Also suitable are the Osgt-1 promoter from the rice glutelin-1 gene (Zheng et al., Mol. Cell. Biol., 13:5829-5842 (1993)), the beta-amylase promoter, and the barley hordein promoter. Other maturing endosperm promoters include the YP0092 (SEQ ID NO:38), PT0676 (SEQ ID NO:12), and PT0708 (SEQ ID NO:17) promoters.

[0124] Ovary Tissue Promoters

[0125] Promoters that are active in ovary tissues such as the ovule wall and mesocarp can also be useful, e.g., a polygalacturonidase promoter, the banana TRX promoter, the melon actin promoter, YP0396 (SEQ ID NO:74), and PT0623 (SEQ ID NO:94). Examples of promoters that are active primarily in ovules include YP0007 (SEQ ID NO:30), YP0111 (SEQ ID NO:46), YP0092 (SEQ ID NO:38), YP0103 (SEQ ID NO:43), YP0028 (SEQ ID NO:33), YP0121 (SEQ ID NO:51), YP0008 (SEQ ID NO:31), YP0039 (SEQ ID NO:34), YP0115 (SEQ ID NO:47), YP0119 (SEQ ID NO:49), YP0120 (SEQ ID NO:50), and YP0374 (SEQ ID NO:68).

[0126] Embryo Sac/Early Endosperm Promoters

[0127] To achieve expression in embryo sac/early endosperm, regulatory regions can be used that are active in polar nuclei and/or the central cell, or in precursors to polar nuclei, but not in egg cells or precursors to egg cells. Most suitable are promoters that drive expression only or predominantly in polar nuclei or precursors thereto and/or the central cell. A pattern of transcription that extends from polar nuclei into early endosperm development can also be found with embryo sac/early endosperm-preferential promoters, although transcription typically decreases significantly in later endosperm development during and after the cellularization phase. Expression in the zygote or developing embryo typically is not present with embryo sac/early endosperm promoters.

[0128] Promoters that may be suitable include those derived from the following genes: Arabidopsis viviparous-1 (see, GenBank No. U93215); Arabidopsis atmycl (see, Urao (1996) Plant Mol. Biol., 32:571-57; Conceicao (1994) Plant, 5:493-505); Arabidopsis FIE (GenBank No. AF129516); Arabidopsis MEA; Arabidopsis FIS2 (GenBank No. AF096096); and FIE 1.1 (U.S. Pat. No. 6,906,244). Other promoters that may be suitable include those derived from the following genes: maize MAC1 (see, Sheridan (1996) Genetics, 142:1009-1020); maize Cat3 (see, GenBank No. L05934; Abler (1993) Plant Mol. Biol., 22:10131-1038). Other promoters include the following Arabidopsis promoters: YP0039 (SEQ ID NO:34), YP0101 (SEQ ID NO:41), YP0102 (SEQ ID NO:42), YP0110 (SEQ ID NO:45), YP0117 (SEQ ID NO:48), YP0119 (SEQ ID NO:49), YP0137 (SEQ ID NO:53), DME, YP0285 (SEQ ID NO:64), and YP0212 (SEQ ID NO:60). Other promoters that may be useful include the following rice promoters: p530c10 (SEQ ID NO:79), pOsFIE2-2 (SEQ ID NO:80), pOsMEA (SEQ ID NO:81), pOsYp102 (SEQ ID NO:82), and pOsYp285 (SEQ ID NO:83).

[0129] Embryo Promoters

[0130] Regulatory regions that preferentially drive transcription in zygotic cells following fertilization can provide embryo-preferential expression. Most suitable are promoters that preferentially drive transcription in early stage embryos prior to the heart stage, but expression in late stage and maturing embryos is also suitable. Embryo-preferential promoters include the barley lipid transfer protein (Ltpl) promoter (Plant Cell Rep (2001) 20:647-654), YP0097 (SEQ ID NO:40), YP0107 (SEQ ID NO:44), YP0088 (SEQ ID NO:37), YP0143 (SEQ ID NO:54), YP0156 (SEQ ID NO:56), PT0650 (SEQ ID NO:8), PT0695 (SEQ ID NO:16), PT0723 (SEQ ID NO:19), PT0838 (SEQ ID NO:25), PT0879 (SEQ ID NO:28), and PT0740 (SEQ ID NO:20).

[0131] Photosynthetic Tissue Promoters

[0132] Promoters active in photosynthetic tissue confer transcription in green tissues such as leaves and stems. Most suitable are promoters that drive expression only or predominantly in such tissues. Examples of such promoters include the ribulose-1,5-bisphosphate carboxylase (RbcS) promoters such as the RbcS promoter from eastern larch (Larix laricina), the pine cab6 promoter (Yamamoto et al., Plant Cell Physiol., 35:773-778 (1994)), the Cab-1 promoter from wheat (Fejes et al., Plant Mol. Biol., 15:921-932 (1990)), the CAB-1 promoter from spinach (Lubberstedt et al., Plant Physiol., 104:997-1006 (1994)), the cab1R promoter from rice (Luan et al., Plant Cell, 4:971-981 (1992)), the pyruvate orthophosphate dikinase (PPDK) promoter from corn (Matsuoka et al., Proc. Natl. Acad. Sci. USA, 90:9586-9590 (1993)), the tobacco Lhcb1*2 promoter (Cerdan et al., Plant Mol. Biol., 33:245-255 (1997)), the Arabidopsis thaliana SUC2 sucrose-H+ symporter promoter (Truernit et al., Planta, 196:564-570 (1995)), and thylakoid membrane protein promoters from spinach (psaD, psaF, psaE, PC, FNR, atpC, atpD, cab, rbcS). Other photosynthetic tissue promoters include PT0535 (SEQ ID NO:3), PT0668 (SEQ ID NO:2), PT0886 (SEQ ID NO:29), YP0144 (SEQ ID NO:55), YP0380 (SEQ ID NO:70) and PT0585 (SEQ ID NO:4).

[0133] Vascular Tissue Promoters

[0134] Examples of promoters that have high or preferential activity in vascular bundles include YP0087 (SEQ ID NO:86), YP0093 (SEQ ID NO:87), YP0108 (SEQ ID NO:88), YP0022 (SEQ ID NO:89), and YP0080 (SEQ ID NO:90). Other vascular tissue-preferential promoters include the glycine-rich cell wall protein GRP 1.8 promoter (Keller and Baumgartner, Plant Cell, 3(10):1051-1061 (1991)), the Commelina yellow mottle virus (CoYMV) promoter (Medberry et al., Plant Cell, 4(2):185-192 (1992)), and the rice tungro bacilliform virus (RTBV) promoter (Dai et al., Proc. Natl. Acad. Sci. USA, 101(2):687-692 (2004)).

[0135] Inducible Promoters

[0136] Inducible promoters confer transcription in response to external stimuli such as chemical agents or environmental stimuli. For example, inducible promoters can confer transcription in response to hormones such as giberellic acid or ethylene, or in response to light or drought. Examples of drought-inducible promoters include YP0380 (SEQ ID NO:70), PT0848 (SEQ ID NO:26), YP0381 (SEQ ID NO:71), YP0337 (SEQ ID NO:66), PT0633 (SEQ ID NO:7), YP0374 (SEQ ID NO:68), PT0710 (SEQ ID NO:18), YP0356 (SEQ ID NO:67), YP0385 (SEQ ID NO:73), YP0396 (SEQ ID NO:74), YP0388 (SEQ ID NO:92), YP0384 (SEQ ID NO:72), PT0688 (SEQ ID NO:15), YP0286 (SEQ ID NO:65), YP0377 (SEQ ID NO:69), PD1367 (SEQ ID NO:78), and PD0901 (SEQ ID NO:93). Examples of nitrogen-inducible promoters include PT0863 (SEQ ID NO:27), PT0829 (SEQ ID NO:23), PT0665 (SEQ ID NO:10), and PT0886 (SEQ ID NO:29). Examples of shade-inducible promoters include PR0924 (SEQ ID NO:91) and PT0678 (SEQ ID NO:13).

[0137] Basal Promoters

[0138] A basal promoter is the minimal sequence necessary for assembly of a transcription complex required for transcription initiation. Basal promoters frequently include a “TATA box” element that may be located between about 15 and about 35 nucleotides upstream from the site of transcription initiation. Basal promoters also may include a “CCAAT box” element (typically the sequence CCAAT) and/or a GGGCG sequence, which can be located between about 40 and about 200 nucleotides, typically about 60 to about 120 nucleotides, upstream from the transcription start site.

[0139] Other Promoters

[0140] Other classes of promoters include, but are not limited to, shoot-preferential, callus-preferential, trichome cell-preferential, guard cell-preferential such as PT0678 (SEQ ID NO:13), tuber-preferential, parenchyma cell-preferential, and senescence-preferential promoters. Promoters designated YP0086 (SEQ ID NO:36), YP0188 (SEQ ID NO:58), YP0263 (SEQ ID NO:62), PT0758 (SEQ ID NO:22), PT0743 (SEQ ID NO:21), PT0829 (SEQ ID NO:23), YP0119 (SEQ ID NO:49), and YP0096 (SEQ ID NO:39), as described in the above-referenced patent applications, may also be useful.

[0141] Other Regulatory Regions

[0142] A 5′ untranslated region (UTR) can be included in nucleic acid constructs described herein. A 5′ UTR is transcribed, but is not translated, and lies between the start site of the transcript and the translation initiation codon and may include the +1 nucleotide. A 3′ UTR can be positioned between the translation termination codon and the end of the transcript. UTRs can have particular functions such as increasing mRNA stability or attenuating translation. Examples of 3′ UTRs include, but are not limited to, polyadenylation signals and transcription termination sequences, e.g., a nopaline synthase termination sequence.

[0143] It will be understood that more than one regulatory region may be present in a recombinant polynucleotide, e.g., introns, enhancers, upstream activation regions, transcription terminators, and inducible elements. Thus, for example, more than one regulatory region can be operably linked to the sequence of a polynucleotide encoding a protein-modulating polypeptide.

[0144] Regulatory regions, such as promoters for endogenous genes, can be obtained by chemical synthesis or by subcloning from a genomic DNA that includes such a regulatory region. A nucleic acid comprising such a regulatory region can also include flanking sequences that contain restriction enzyme sites that facilitate subsequent manipulation.

[0145] Transgenic Plants and Plant Cells

[0146] The invention also features transgenic plant cells and plants comprising at least one recombinant nucleic acid construct described herein. A plant or plant cell can be transformed by having a construct integrated into its genome, i.e., can be stably transformed. Stably transformed cells typically retain the introduced nucleic acid with each cell division. A plant or plant cell can also be transiently transformed such that the construct is not integrated into its genome. Transiently transformed cells typically lose all or some portion of the introduced nucleic acid construct with each cell division such that the introduced nucleic acid cannot be detected in daughter cells after a sufficient number of cell divisions. Both transiently transformed and stably transformed transgenic plants and plant cells can be useful in the methods described herein.

[0147] Transgenic plant cells used in methods described herein can constitute part or all of a whole plant. Such plants can be grown in a manner suitable for the species under consideration, either in a growth chamber, a greenhouse, or in a field. Transgenic plants can be bred as desired for a particular purpose, e.g., to introduce a recombinant nucleic acid into other lines, to transfer a recombinant nucleic acid to other species, or for further selection of other desirable traits. Alternatively, transgenic plants can be propagated vegetatively for those species amenable to such techniques. As used herein, a transgenic plant also refers to progeny of an initial transgenic plant. Progeny includes descendants of a particular plant or plant line. Progeny of an instant plant include seeds formed on F₁, F₂, F₃, F₄, F₅, F₆ and subsequent generation plants, or seeds formed on BC₁, BC₂, BC₃, and subsequent generation plants, or seeds formed on F₁BC₁, F₁BC₂, F₁BC₃, and subsequent generation plants. The designation F₁ refers to the progeny of a cross between two parents that are genetically distinct. The designations F₂, F₃, F₄, F₅ and F₆ refer to subsequent generations of self- or sib-pollinated progeny of an F₁ plant. Seeds produced by a transgenic plant can be grown and then selfed (or outcrossed and selfed) to obtain seeds homozygous for the nucleic acid construct.

[0148] Transgenic plants can be grown in suspension culture, or tissue or organ culture. For the purposes of this invention, solid and/or liquid tissue culture techniques can be used. When using solid medium, transgenic plant cells can be placed directly onto the medium or can be placed onto a filter that is then placed in contact with the medium. When using liquid medium, transgenic plant cells can be placed onto a flotation device, e.g., a porous membrane that contacts the liquid medium. Solid medium typically is made from liquid medium by adding agar. For example, a solid medium can be Murashige and Skoog (MS) medium containing agar and a suitable concentration of an auxin, e.g., 2,4-dichlorophenoxyacetic acid (2,4-D), and a suitable concentration of a cytokinin, e.g., kinetin.

[0149] When transiently transformed plant cells are used, a reporter sequence encoding a reporter polypeptide having a reporter activity can be included in the transformation procedure and an assay for reporter activity or expression can be performed at a suitable time after transformation. A suitable time for conducting the assay typically is about 1-21 days after transformation, e.g., about 1-14 days, about 1-7 days, or about 1-3 days. The use of transient assays is particularly convenient for rapid analysis in different species, or to confirm expression of a heterologous protein-modulating polypeptide whose expression has not previously been confirmed in particular recipient cells.

[0150] Techniques for introducing nucleic acids into monocotyledonous and dicotyledonous plants are known in the art, and include, without limitation, Agrobacterium-mediated transformation, viral vector-mediated transformation, electroporation and particle gun transformation, e.g., U.S. Pat. Nos. 5,538,880; 5,204,253; 6,329,571 and 6,013,863. If a cell or cultured tissue is used as the recipient tissue for transformation, plants can be regenerated from transformed cultures if desired, by techniques known to those skilled in the art.

[0151] In aspects related to making transgenic plants, a typical step involves selection or screening of transformed plants, e.g., for the presence of a functional vector as evidenced by expression of a selectable marker. Selection or screening can be carried out among a population of recipient cells to identify transformants using selectable marker genes such as herbicide resistance genes. Physical and biochemical methods can be used to identify transformants. These include Southern analysis or PCR amplification for detection of a polynucleotide; Northern blots, S1 RNase protection, primer-extension, or RT-PCR amplification for detecting RNA transcripts; enzymatic assays for detecting enzyme or ribozyme activity of polypeptides and polynucleotides; and protein gel electrophoresis, Western blots, immunoprecipitation, and enzyme-linked immunoassays to detect polypeptides. Other techniques such as in situ hybridization, enzyme staining, and immunostaining also can be used to detect the presence or expression of polypeptides and/or polynucleotides. Methods for performing all of the referenced techniques are known.

[0152] A population of transgenic plants can be screened and/or selected for those members of the population that have a desired trait or phenotype conferred by expression of the transgene. For example, a population of progeny of a single transformation event can be screened for those plants having a desired level of expression of a heterologous protein-modulating polypeptide or nucleic acid. As an alternative, a population of plants comprising independent transformation events can be screened for those plants having a desired trait, such as a modulated level of protein. Selection and/or screening can be carried out over one or more generations, which can be useful to identify those plants that have a statistically significant difference in a protein level as compared to a corresponding level in a control plant. Selection and/or screening can also be carried out in more than one geographic location. In some cases, transgenic plants can be grown and selected under conditions which induce a desired phenotype or are otherwise necessary to produce a desired phenotype in a transgenic plant. In addition, selection and/or screening can be carried out during a particular developmental stage in which the phenotype is expected to be exhibited by the plant. Selection and/or screening can be carried out to choose those transgenic plants having a statistically significant difference in a protein level relative to a control plant that lacks the transgene. Selected or screened transgenic plants have an altered phenotype as compared to a corresponding control plant, as described in the “Transgenic Plant Phenotypes” section below.

[0153] Plant Species

[0154] The polynucleotides and vectors described herein can be used to transform a number of monocotyledonous and dicotyledonous plants and plant cell systems, including dicots such as alfalfa, almond, amaranth, apple, beans (including kidney beans, lima beans, dry beans, green beans), brazil nut, broccoli, cabbage, carrot, cashew, castor bean, cherry, chick peas, chicory, clover, cocoa, coffee, cotton, crambe, flax, grape, grapefruit, hazelnut, lemon, lentils, lettuce, linseed, macadamia nut, mango, melon (e.g., watermelon, cantaloupe), mustard, orange, peach, peanut, pear, peas, pecan, pepper, pistachio, plum, potato, oilseed rape, quinoa, rapeseed (high erucic acid and canola), safflower, sesame, soybean, spinach, strawberry, sugar beet, sunflower, sweet potatoes, tea, tomato, walnut, and yams, as well as monocots such as banana, barley, bluegrass, date palm, fescue, field corn, garlic, millet, oat, oil palm, onion, pineapple, popcorn, rice, rye, ryegrass, sorghum, sudangrass, sugarcane, sweet corn, switchgrass, timothy, and wheat. Brown seaweeds, green seaweeds, red seaweeds, and microalgae can also be used.

[0155] Thus, the methods and compositions described herein can be used with dicotyledonous plants belonging, for example, to the orders Apiales, Arecales, Aristochiales, Asterales, Batales, Campanulales, Capparales, Caryophyllales, Casuarinales, Celastrales, Cornales, Cucurbitales, Diapensales, Dilleniales, Dipsacales, Ebenales, Ericales, Eucomiales, Euphorbiales, Fabales, Fagales, Gentianales, Geraniales, Haloragales, Hamamelidales, Illiciales, Juglandales, Lamiales, Laurales, Lecythidales, Leitneriales, Linales, Magniolales, Malvales, Myricales, Myrtales, Nymphaeales, Papaverales, Piperales, Plantaginales, Plumbaginales, Podostemales, Polemoniales, Polygalales, Polygonales, Primulales, Proteales, Rafflesiales, Ranunculales, Rhamnales, Rosales, Rubiales, Salicales, Santales, Sapindales, Sarraceniaceae, Scrophulariales, Solanales, Trochodendrales, Theales, Umbellales, Urticales, and Violales. The methods and compositions described herein also can be utilized with monocotyledonous plants such as those belonging to the orders Alismatales, Arales, Arecales, Asparagales, Bromeliales, Commelinales, Cyclanthales, Cyperales, Eriocaulales, Hydrocharitales, Juncales, Liliales, Najadales, Orchidales, Pandanales, Poales, Restionales, Triuridales, Typhales, Zingiberales, and with plants belonging to Gymnospermae, e.g., Cycadales, Ginkgoales, Gnetales, and Pinales.

[0156] The methods and compositions can be used over a broad range of plant species, including species from the dicot genera Amaranthus, Anacardium, Arachis, Bertholletia, Brassica, Calendula, Camellia, Capsicum, Carthamus, Carya, Chenopodium, Cicer, Cichorium, Cinnamomum, Citrus, Citrullus, Coffea, Corylus, Crambe, Cucumis, Cucurbita, Daucus, Dioscorea, Fragaria, Glycine, Gossypium, Helianthus, Juglans, Lactuca, Lens, Linum, Lycopersicon, Macadamia, Malus, Mangifera, Medicago, Mentha, Nicotiana, Ocimum, Olea, Phaseolus, Pistacia, Pisum, Prunus, Pyrus, Rosmarinus, Salvia, Sesamum, Solanum, Spinacia, Theobroma, Thymus, Trifolium, Vaccinium, Vigna, and Vitis; and the monocot genera Allium, Ananas, Asparagus, Avena, Curcuma, Elaeis, Festuca, Hordeum, Lemna, Lolium, Musa, Oryza, Panicum, Pennisetum, Phleum, Poa, Saccharum, Secale, Sorghum, Triticosecale, Triticum, and Zea.

[0157] The methods and compositions described herein also can be used with brown seaweeds, e.g., Ascophyllum nodosum, Fucus vesiculosus, Fucus serratus, Himanthalia elongata, and Undaria pinnatifida; red seaweeds, e.g., Chondrus crispus, Cracilaria verrucosa, Porphyra umbilicalis, and Palmaria palmata; green seaweeds, e.g., Enteromorpha spp. and Ulva spp.; and microalgae, e.g., Spirulina spp. (S. platensis and S. maxima) and Odontella aurita. In addition, the methods and compositions can be used with Crypthecodinium cohnii, Schizochytrium spp., and Haematococcus pluvialis.

[0158] In some embodiments, a plant is a member of the species Avena sativa, Brassica spp., Cicer arietinum, Gossypium spp., Glycine max, Hordeum vulgare, Lactuca sativa, Medicago sativa, Oryza sativa, Pennisetum glaucum, Phaseolus spp., Phleum pratense, Secale cereale, Trifolium pratense, Triticum aestivum, and Zea mays.

[0159] Expression of Protein-Modulating Polypeptides

[0160] The polynucleotides and recombinant vectors described herein can be used to express a protein-modulating polypeptide in a plant species of interest. The term “expression” refers to the process of converting genetic information of a polynucleotide into RNA through transcription, which is catalyzed by an enzyme, RNA polymerase, and into protein, through translation of mRNA on ribosomes. “Up-regulation” or “activation” refers to regulation that increases the production of expression products (mRNA, polypeptide, or both) relative to basal or native states, while “down-regulation” or “repression” refers to regulation that decreases production of expression products (mRNA, polypeptide, or both) relative to basal or native states.

[0161] In some cases, expression of a protein-modulating polypeptide inhibits one or more functions of an endogenous polypeptide. For example, a nucleic acid that encodes a dominant negative polypeptide can be used to inhibit protein function. A dominant negative polypeptide typically is mutated or truncated relative to an endogenous wild type polypeptide, and its presence in a cell inhibits one or more functions of the wild type polypeptide in that cell, i.e., the dominant negative polypeptide is genetically dominant and confers a loss of function. The mechanism by which a dominant negative polypeptide confers such a phenotype can vary but often involves a protein-protein interaction or a protein-DNA interaction. For example, a dominant negative polypeptide can be an enzyme that is truncated relative to a native wild type enzyme, such that the truncated polypeptide retains domains involved in binding a first protein but lacks domains involved in binding a second protein. The truncated polypeptide is thus unable to properly modulate the activity of the second protein. See, e.g., US 2007/0056058. As another example, a point mutation that results in a non-conservative amino acid substitution in a catalytic domain can result in a dominant negative polypeptide. See, e.g., US 2005/032221. As another example, a dominant negative polypeptide can be a transcription factor that is truncated relative to a native wild type transcription factor, such that the truncated polypeptide retains the DNA binding domain(s) but lacks the activation domain(s). Such a truncated polypeptide can inhibit the wild type transcription factor from binding DNA, thereby inhibiting transcription activation.

[0162] A number of nucleic acid based methods, including antisense RNA, ribozyme directed RNA cleavage, post-transcriptional gene silencing (PTGS), e.g., RNA interference (RNAi), and transcriptional gene silencing (TGS) can be used to inhibit gene expression in plants. Antisense technology is one well-known method. In this method, a nucleic acid segment from a gene to be repressed is cloned and operably linked to a regulatory region and a transcription termination sequence so that the antisense strand of RNA is transcribed. The recombinant vector is then transformed into plants, as described herein, and the antisense strand of RNA is produced. The nucleic acid segment need not be the entire sequence of the gene to be repressed, but typically will be substantially complementary to at least a portion of the sense strand of the gene to be repressed. Generally, higher homology can be used to compensate for the use of a shorter sequence. Typically, a sequence of at least 30 nucleotides is used, e.g., at least 40, 50, 80, 100, 200, 500 nucleotides or more.

[0163] In another method, a nucleic acid can be transcribed into a ribozyme, or catalytic RNA, that affects expression of an mRNA. See, U.S. Pat. No. 6,423,885. Ribozymes can be designed to specifically pair with virtually any target RNA and cleave the phosphodiester backbone at a specific location, thereby functionally inactivating the target RNA. Heterologous nucleic acids can encode ribozymes designed to cleave particular mRNA transcripts, thus preventing expression of a polypeptide. Hammerhead ribozymes are useful for destroying particular mRNAs, although various ribozymes that cleave mRNA at site-specific recognition sequences can be used. Hammerhead ribozymes cleave mRNAs at locations dictated by flanking regions that form complementary base pairs with the target mRNA. The sole requirement is that the target RNA contain a 5′-UG-3′ nucleotide sequence. The construction and production of hammerhead ribozymes is known in the art. See, for example, U.S. Pat. No. 5,254,678 and WO 02/46449 and references cited therein. Hammerhead ribozyme sequences can be embedded in a stable RNA such as a transfer RNA (tRNA) to increase cleavage efficiency in vivo. Perriman et al., Proc. Natl. Acad. Sci. USA, 92(13):6175-6179 (1995); de Feyter and Gaudron, Methods in Molecular Biology, Vol. 74, Chapter 43, “Expressing Ribozymes in Plants”, Edited by Turner, P. C., Humana Press Inc., Totowa, N.J. RNA endoribonucleases which have been described, such as the one that occurs naturally in Tetrahymena thermophile, can be useful. See, for example, U.S. Pat. Nos. 4,987,071 and 6,423,885.

[0164] PTGS, e.g., RNAi, can also be used to inhibit the expression of a gene. For example, a construct can be prepared that includes a sequence that is transcribed into an RNA that can anneal to itself, e.g., a double stranded RNA having a stem-loop structure. In some embodiments, one strand of the stem portion of a double stranded RNA comprises a sequence that is similar or identical to the sense coding sequence of a protein-modulating polypeptide, and that is from about 10 nucleotides to about 2,500 nucleotides in length. The length of the sequence that is similar or identical to the sense coding sequence can be from 10 nucleotides to 500 nucleotides, from 15 nucleotides to 300 nucleotides, from 20 nucleotides to 100 nucleotides, or from 25 nucleotides to 100 nucleotides. The other strand of the stem portion of a double stranded RNA comprises a sequence that is similar or identical to the antisense strand of the coding sequence of the protein-modulating polypeptide, and can have a length that is shorter, the same as, or longer than the corresponding length of the sense sequence. In some cases, one strand of the stem portion of a double stranded RNA comprises a sequence that is similar or identical to the 3′ or 5′ untranslated region of an mRNA encoding a protein-modulating polypeptide, and the other strand of the stem portion of the double stranded RNA comprises a sequence that is similar or identical to the sequence that is complementary to the 3′ or 5′ untranslated region, respectively, of the mRNA encoding the protein-modulating polypeptide. In other embodiments, one strand of the stem portion of a double stranded RNA comprises a sequence that is similar or identical to the sequence of an intron in the pre-mRNA encoding a protein-modulating polypeptide, and the other strand of the stem portion comprises a sequence that is similar or identical to the sequence that is complementary to the sequence of the intron in the pre-mRNA. The loop portion of a double stranded RNA can be from 3 nucleotides to 5,000 nucleotides, e.g., from 3 nucleotides to 25 nucleotides, from 15 nucleotides to 1,000 nucleotides, from 20 nucleotides to 500 nucleotides, or from 25 nucleotides to 200 nucleotides. The loop portion of the RNA can include an intron. A double stranded RNA can have zero, one, two, three, four, five, six, seven, eight, nine, ten, or more stem-loop structures. A construct including a sequence that is operably linked to a regulatory region and a transcription termination sequence, and that is transcribed into an RNA that can form a double stranded RNA, is transformed into plants as described herein. Methods for using RNAi to inhibit the expression of a gene are known to those of skill in the art. See, e.g., U.S. Pat. Nos. 5,034,323; 6,326,527; 6,452,067; 6,573,099; 6,753,139; and 6,777,588. See also WO 97/01952; WO 98/53083; WO 99/32619; WO 98/36083; and U.S. Patent Publications 20030175965, 20030175783, 20040214330, and 20030180945.

[0165] Constructs containing regulatory regions operably linked to nucleic acid molecules in sense orientation can also be used to inhibit the expression of a gene. The transcription product can be similar or identical to the sense coding sequence of a protein-modulating polypeptide. The transcription product can also be unpolyadenylated, lack a 5′ cap structure, or contain an unsplicable intron. Methods of inhibiting gene expression using a full-length cDNA as well as a partial cDNA sequence are known in the art. See, e.g., U.S. Pat. No. 5,231,020.

[0166] In some embodiments, a construct containing a nucleic acid having at least one strand that is a template for both sense and antisense sequences that are complementary to each other is used to inhibit the expression of a gene. The sense and antisense sequences can be part of a larger nucleic acid molecule or can be part of separate nucleic acid molecules having sequences that are not complementary. The sense or antisense sequence can be a sequence that is identical or complementary to the sequence of an mRNA, the 3′ or 5′ untranslated region of an mRNA, or an intron in a pre-mRNA encoding a protein-modulating polypeptide. In some embodiments, the sense or antisense sequence is identical or complementary to a sequence of the regulatory region that drives transcription of the gene encoding a protein-modulating polypeptide. In each case, the sense sequence is the sequence that is complementary to the antisense sequence.

[0167] The sense and antisense sequences can be any length greater than about 10 nucleotides (e.g., 12, 13, 14, 15, 16, 17, 18, 19, 20, 21, 22, 23, 24, 25, 26, 27, 28, 29, 30, or more nucleotides). For example, an antisense sequence can be 21 or 22 nucleotides in length. Typically, the sense and antisense sequences range in length from about 15 nucleotides to about 30 nucleotides, e.g., from about 18 nucleotides to about 28 nucleotides, or from about 21 nucleotides to about 25 nucleotides.

[0168] In some embodiments, an antisense sequence is a sequence complementary to an mRNA sequence encoding a protein-modulating polypeptide described herein. The sense sequence complementary to the antisense sequence can be a sequence present within the mRNA of the protein-modulating polypeptide. Typically, sense and antisense sequences are designed to correspond to a 15-30 nucleotide sequence of a target mRNA such that the level of that target mRNA is reduced.

[0169] In some embodiments, a construct containing a nucleic acid having at least one strand that is a template for more than one sense sequence (e.g., 2, 3, 4, 5, 6, 7, 8, 9, 10 or more sense sequences) can be used to inhibit the expression of a gene. Likewise, a construct containing a nucleic acid having at least one strand that is a template for more than one antisense sequence (e.g., 2, 3, 4, 5, 6, 7, 8, 9, 10 or more antisense sequences) can be used to inhibit the expression of a gene. For example, a construct can contain a nucleic acid having at least one strand that is a template for two sense sequences and two antisense sequences. The multiple sense sequences can be identical or different, and the multiple antisense sequences can be identical or different. For example, a construct can have a nucleic acid having one strand that is a template for two identical sense sequences and two identical antisense sequences that are complementary to the two identical sense sequences. Alternatively, an isolated nucleic acid can have one strand that is a template for (1) two identical sense sequences 20 nucleotides in length, (2) one antisense sequence that is complementary to the two identical sense sequences 20 nucleotides in length, (3) a sense sequence 30 nucleotides in length, and (4) three identical antisense sequences that are complementary to the sense sequence 30 nucleotides in length. The constructs provided herein can be designed to have any arrangement of sense and antisense sequences. For example, two identical sense sequences can be followed by two identical antisense sequences or can be positioned between two identical antisense sequences.

[0170] A nucleic acid having at least one strand that is a template for one or more sense and/or antisense sequences can be operably linked to a regulatory region to drive transcription of an RNA molecule containing the sense and/or antisense sequence(s). In addition, such a nucleic acid can be operably linked to a transcription terminator sequence, such as the terminator of the nopaline synthase (nos) gene. In some cases, two regulatory regions can direct transcription of two transcripts: one from the top strand, and one from the bottom strand. See, for example, Yan et al., Plant Physiol., 141:1508-1518 (2006). The two regulatory regions can be the same or different. The two transcripts can form double-stranded RNA molecules that induce degradation of the target RNA. In some cases, a nucleic acid can be positioned within a T-DNA or P-DNA such that the left and right T-DNA border sequences, or the left and right border-like sequences of the P-DNA, flank or are on either side of the nucleic acid. The nucleic acid sequence between the two regulatory regions can be from about 15 to about 300 nucleotides in length. In some embodiments, the nucleic acid sequence between the two regulatory regions is from about 15 to about 200 nucleotides in length, from about 15 to about 100 nucleotides in length, from about 15 to about 50 nucleotides in length, from about 18 to about 50 nucleotides in length, from about 18 to about 40 nucleotides in length, from about 18 to about 30 nucleotides in length, or from about 18 to about 25 nucleotides in length.

[0171] In some nucleic-acid based methods for inhibition of gene expression in plants, a suitable nucleic acid can be a nucleic acid analog. Nucleic acid analogs can be modified at the base moiety, sugar moiety, or phosphate backbone to improve, for example, stability, hybridization, or solubility of the nucleic acid. Modifications at the base moiety include deoxyuridine for deoxythymidine, and 5-methyl-2′-deoxycytidine and 5-bromo-2′-deoxycytidine for deoxycytidine. Modifications of the sugar moiety include modification of the 2′ hydroxyl of the ribose sugar to form 2′-O-methyl or 2′-O-allyl sugars. The deoxyribose phosphate backbone can be modified to produce morpholino nucleic acids, in which each base moiety is linked to a six-membered morpholino ring, or peptide nucleic acids, in which the deoxyphosphate backbone is replaced by a pseudopeptide backbone and the four bases are retained. See, for example, Summerton and Weller, 1997, Antisense Nucleic Acid Drug Dev., 7:187-195; Hyrup et al., Bioorgan. Med. Chem., 4:5-23 (1996). In addition, the deoxyphosphate backbone can be replaced with, for example, a phosphorothioate or phosphorodithioate backbone, a phosphoroamidite, or an alkyl phosphotriester backbone.

[0172] Transgenic Plant Phenotypes

[0173] In some embodiments, a plant in which expression of a protein-modulating polypeptide is modulated can have increased levels of seed protein. For example, a protein-modulating polypeptide described herein can be expressed in a transgenic plant, resulting in increased levels of seed protein. The seed protein level can be increased by at least 2 percent, e.g., 2, 3, 4, 5, 6, 7, 8, 9, 10, 11, 12, 13, 14, 15, 16, 17, 18, 19, 20, 25, 30, 35, 40, 45, 50, 55, 60, or more than 60 percent, as compared to the seed protein level in a corresponding control plant that does not express the transgene. In some embodiments, a plant in which expression of a protein-modulating polypeptide is modulated can have decreased levels of seed protein. The seed protein level can be decreased by at least 2 percent, e.g., 2, 3, 4, 5, 10, 15, 20, 25, 30, 35, or more than 35 percent, as compared to the seed protein level in a corresponding control plant that does not express the transgene.

[0174] Plants for which modulation of levels of seed protein can be useful include, without limitation, amaranth, barley, beans, canola, coffee, cotton, edible nuts (e.g., almond, brazil nut, cashew, hazelnut, macadamia nut, peanut, pecan, pine nut, pistachio, walnut), field corn, millet, oat, oil palm, peas, popcorn, rapeseed, rice, rye, safflower, sorghum, soybean, sunflower, sweet corn, and wheat. Increases in seed protein in such plants can provide improved nutritional content in geographic locales where dietary intake of protein/amino acid is often insufficient. Decreases in seed protein in such plants can be useful in situations where seeds are not the primary plant part that is harvested for human or animal consumption.

[0175] In some embodiments, a plant in which expression of a protein-modulating polypeptide is modulated can have increased or decreased levels of protein in one or more non-seed tissues, e.g., leaf tissues, stem tissues, root or corm tissues, or fruit tissues other than seed. For example, the protein level can be increased by at least 2 percent, e.g., 2, 3, 4, 5, 6, 7, 8, 9, 10, 11, 12, 13, 14, 15, 16, 17, 18, 19, 20, 25, 30, 35, 40, 45, 50, 55, 60, or more than 60 percent, as compared to the protein level in a corresponding control plant that does not express the transgene. In some embodiments, a plant in which expression of a protein-modulating polypeptide is modulated can have decreased levels of protein in one or more non-seed tissues. The protein level can be decreased by at least 2 percent, e.g., 2, 3, 4, 5, 10, 15, 20, 25, 30, 35, or more than 35 percent, as compared to the protein level in a corresponding control plant that does not express the transgene.

[0176] Plants for which modulation of levels of protein in non-seed tissues can be useful include, without limitation, alfalfa, amaranth, apple, banana, barley, beans, bluegrass, broccoli, carrot, cherry, clover, coffee, fescue, field corn, grape, grapefruit, lemon, lettuce, mango, melon, millet, oat, oil palm, onion, orange, peach, peanut, pear, peas, pineapple, plum, popcorn, potato, rapeseed, rice, rye, ryegrass, safflower, sorghum, soybean, strawberry, sugarcane, sudangrass, sunflower, sweet corn, switchgrass, timothy, tomato, and wheat. Increases in non-seed protein in such plants can provide improved nutritional content in edible fruits and vegetables, or improved animal forage. Decreases in non-seed protein can provide more efficient partitioning of nitrogen to plant part(s) that are harvested for human or animal consumption.

[0177] In some embodiments, a plant in which expression of a protein-modulating polypeptide having an amino acid sequence corresponding to SEQ ID NO:102 is modulated can have modulated levels of seed oil accompanying increased levels of seed protein. The oil level can be modulated by at least 2 percent, e.g., 2, 3, 4, 5, 10, 15, 20, 25, 30, 35, or more than 35 percent.

[0178] In some embodiments, a plant in which expression of a protein-modulating polypeptide having an amino acid sequence corresponding to SEQ ID NO:96, SEQ ID NO:112, SEQ ID NO:114, or SEQ ID NO:118 is modulated can have decreased levels of seed oil accompanying increased levels of seed protein. The oil level can be decreased by at least 2 percent, e.g., 3, 4, 5, 10, 15, 20, 25, 30, 35, or more than 35 percent, as compared to the oil level in a corresponding control plant that does not express the transgene.

[0179] Typically, a difference (e.g., an increase) in the amount of oil or protein in a transgenic plant or cell relative to a control plant or cell is considered statistically significant at p≦0.05 with an appropriate parametric or non-parametric statistic, e.g., Chi-square test, Student's t-test, Mann-Whitney test, or F-test. In some embodiments, a difference in the amount of oil or protein is statistically significant at p<0.01, p<0.005, or p<0.001. A statistically significant difference in, for example, the amount of protein in a transgenic plant compared to the amount in cells of a control plant indicates that (1) the recombinant nucleic acid present in the transgenic plant results in altered protein levels and/or (2) the recombinant nucleic acid warrants further study as a candidate for altering the amount of protein in a plant.

[0180] The phenotype of a transgenic plant is evaluated relative to a control plant that does not express the exogenous polynucleotide of interest, such as a corresponding wild type plant, a corresponding plant that is not transgenic for the exogenous polynucleotide of interest but otherwise is of the same genetic background as the transgenic plant of interest, or a corresponding plant of the same genetic background in which expression of the polypeptide is suppressed, inhibited, or not induced (e.g., where expression is under the control of an inducible promoter). A plant is said “not to express” a polypeptide when the plant exhibits less than 10%, e.g., less than 9%, 8%, 7%, 6%, 5%, 4%, 3%, 2%, 1%, 0.5%, 0.1%, 0.01%, or 0.001%, of the amount of polypeptide or mRNA encoding the polypeptide exhibited by the plant of interest. Expression can be evaluated using methods including, for example, RT-PCR, Northern blots, S1 RNase protection, primer extensions, Western blots, protein gel electrophoresis, immunoprecipitation, enzyme-linked immunoassays, chip assays, and mass spectrometry. It should be noted that if a polypeptide is expressed under the control of a tissue-preferential or broadly expressing promoter, expression can be evaluated in the entire plant or in a selected tissue. Similarly, if a polypeptide is expressed at a particular time, e.g., at a particular time in development or upon induction, expression can be evaluated selectively at a desired time period.

[0181] Information that the polypeptides disclosed herein can modulate protein content can be useful in breeding of crop plants. Based on the effect of disclosed polypeptides on protein content, one can search for and identify polymorphisms linked to genetic loci for such polypeptides. Polymorphisms that can be identified include simple sequence repeats (SSRs), rapid amplification of polymorphic DNA (RAPDs), amplified fragment length polymorphisms (AFLPs) and restriction fragment length polymorphisms (RFLPs).

[0182] If a polymorphism is identified, its presence and frequency in populations is analyzed to determine if it is statistically significantly correlated to an alteration in protein content. Those polymorphisms that are correlated with an alteration in protein content can be incorporated into a marker assisted breeding program to facilitate the development of lines that have a desired alteration in protein content. Typically, a polymorphism identified in such a manner is used with polymorphisms at other loci that are also correlated with a desired alteration in protein content.

[0183] Articles of Manufacture

[0184] Transgenic plants provided herein have particular uses in the agricultural and nutritional industries. For example, transgenic plants described herein can be used to make animal feed and food products, such as grains and fresh, canned, and frozen vegetables. Suitable plants with which to make such products include alfalfa, barley, beans, clover, corn, millet, oat, peas, rice, rye, soybean, timothy, and wheat. For example, soybeans can be used to make various food products, including tofu, soy flour, and soy protein concentrates and isolates. Soy protein concentrates can be used to make textured soy protein products that resemble meat products. Soy protein isolates can be added to many soy food products, such as soy sausage patties, soybean burgers, soy protein bars, powdered soy protein beverages, soy protein baby formulas, and soy protein supplements. Such products are useful to provide increased or decreased protein and caloric content in the diet.

[0185] Seeds from transgenic plants described herein can be used as is, e.g., to grow plants, or can be used to make food products, such as flour. Seeds can be conditioned and bagged in packaging material by means known in the art to form an article of manufacture. Packaging material such as paper and cloth are well known in the art. A package of seed can have a label e.g., a tag or label secured to the packaging material, a label printed on the packaging material, or a label inserted within the package.

[0186] The invention will be further described in the following examples, which do not limit the scope of the invention described in the claims.

### EXAMPLES

### Example 1

### Transgenic Plants

[0187] The following symbols are used in the Examples: T₁: first generation transformant; T₂: second generation, progeny of self-pollinated T₁ plants; T₃: third generation, progeny of self-pollinated T₂ plants; T₄: fourth generation, progeny of self-pollinated T₃ plants. Independent transformations are referred to as events.

[0188] The following is a list of nucleic acids that were isolated from Arabidopsis thaliana plants. ANNOT ID 826303 (SEQ ID NO:95) is a DNA clone that is predicted to encode a 303 amino acid polypeptide (SEQ ID NO:96). ANNOT ID 842015 (SEQ ID NO:111) is a DNA clone that is predicted to encode a 462 amino acid RASPBERRY3 polypeptide (SEQ ID NO:112). CLONE ID 97982 (SEQ ID NO:113) is a DNA clone that is predicted to encode a 277 amino acid carbonate dehydratase-like polypeptide (SEQ ID NO:114). ANNOT ID 571199 (SEQ ID NO:101) is a DNA clone that is predicted to encode a 335 amino acid polypeptide (SEQ ID NO:102). ANNOT ID 564367 (SEQ ID NO:117) is a DNA clone that is predicted to encode a 174 amino acid heat shock polypeptide (SEQ ID NO:118). ANNOT ID 851745 (SEQ ID NO:127) is a DNA clone that is predicted to encode a 306 amino acid polypeptide (SEQ ID NO:128).

[0189] The following nucleic acid was isolated from Zea mays. 3′-truncated CLONE ID 258034 (SEQ ID NO:115) is a DNA clone that is predicted to encode a 68 amino acid polypeptide (SEQ ID NO:116). As discussed above, the polypeptide having the amino acid sequence set forth in SEQ ID NO:116 is a chimeric polypeptide. Residues 1-45 of SEQ ID NO:116 correspond to residues 1-45 of SEQ ID NO:181 while residues 46-68 of SEQ ID NO:116 correspond to the predicted read-through translational product of vector sequence.

[0190] Each isolated nucleic acid described above was cloned into a Ti plasmid vector, CRS 338, containing a phosphinothricin acetyltransferase gene which confers Finale™ resistance to transformed plants. Constructs were made using CRS 338 that contained ANNOT ID 826303, ANNOT ID 842015, CLONE ID 97982, ANNOT ID 571199, ANNOT ID 564367, ANNOT ID 851745, or 3′-truncated CLONE ID 258034, each operably linked to a CaMV 35S promoter. Wild-type Arabidopsis thaliana ecotype Wassilewskija (Ws) plants were transformed separately with each construct. The transformations were performed essentially as described in Bechtold et al., C.R. Acad. Sci. Paris, 316:1194-1199 (1993).

[0191] Transgenic Arabidopsis lines containing ANNOT ID 826303, ANNOT ID 842015, CLONE ID 97982, ANNOT ID 571199, ANNOT ID 564367, ANNOT ID 851745, or CLONE ID 258034 were designated ME11370, ME 11410, ME02482, ME11409, ME10870, ME11351, or ME07978, respectively. The presence of each vector containing a Ceres clone described above in the respective transgenic Arabidopsis line transformed with the vector was confirmed by Finale™ resistance, polymerase chain reaction (PCR) amplification from green leaf tissue extract, and/or sequencing of PCR products. As controls, wild-type Arabidopsis ecotype Ws plants were transformed with the empty vector CRS 338.

### Example 2

### Analysis of Protein Content in Transgenic Arabidopsis Seeds

[0192] An analytical method based on Fourier transform near-infrared (FT-NIR) spectroscopy was developed, validated, and used to perform a high-throughput screen of transgenic seed lines for alterations in seed protein content. To calibrate the FT-NIR spectroscopy method, total nitrogen elemental analysis was used as a primary method to analyze a sub-population of randomly selected transgenic seed lines. The overall percentage of nitrogen in each sample was determined. Percent nitrogen values were multiplied by a conversion factor to obtain percent total protein values. A conversion factor of 5.30 was selected based on data for cotton, sunflower, safflower, and sesame seed (Rhee, K. C., Determination of Total Nitrogen In Handbook of Food Analytical Chemistry—Water, Proteins, Enzymes, Lipids, and Carbohydrates (R. Wrolstad, et al., ed.), John Wiley and Sons, Inc., p. 105, (2005)). The same seed lines were then analyzed by FT-NIR spectroscopy, and the protein values calculated via the primary method were entered into the FT-NIR chemometrics software (Bruker Optics, Billerica, Mass.) to create a calibration curve for analysis of seed protein content by FT-NIR spectroscopy.

[0193] Elemental analysis was performed using a FlashEA 1112 NC Analyzer (Thermo Finnigan, San Jose, Calif.). To analyze total nitrogen content, 2.00±0.15 mg of dried transgenic Arabidopsis seed was weighed into a tared tin cup. The tin cup with the seed was weighed, crushed, folded in half, and placed into an autosampler slot on the FlashEA 1112 NC Analyzer (Thermo Finnigan). Matched controls were prepared in a manner identical to the experimental samples and spaced evenly throughout the batch. The first three samples in every batch were a blank (empty tin cup), a bypass, (approximately 5 mg of aspartic acid), and a standard (5.00±0.15 mg aspartic acid), respectively. Blanks were entered between every 15 experimental samples. Each sample was analyzed in triplicate.

[0194] The FlashEA 1112 NC Analyzer (Thermo Finnigan) instrument parameters were as follows: left furnace 900° C., right furnace 840° C., oven 50° C., gas flow carrier 130 mL/min., and gas flow reference 100 mL/min. The data parameter LLOD was 0.25 mg for the standard and different for other materials. The data parameter LLOQ was 3.0 mg for the standard, 1.0 mg for seed tissue, and different for other materials.

[0195] Quantification was performed using the Eager 300 software (Thermo Finnigan). Replicate percent nitrogen measurements were averaged and multiplied by a conversion factor of 5.30 to obtain percent total protein values. For results to be considered valid, the standard deviation between replicate samples was required to be less than 10%. The percent nitrogen of the aspartic acid standard was required to be within ±1.0% of the theoretical value. For a run to be declared valid, the weight of the aspartic acid (standard) was required to be between 4.85 and 5.15 mg, and the blank(s) were required to have no recorded nitrogen content.

[0196] The same seed lines that were analyzed for elemental nitrogen content were also analyzed by FT-NIR spectroscopy, and the percent total protein values determined by elemental analysis were entered into the FT-NIR chemometrics software (Bruker Optics, Billerica, Mass.) to create a calibration curve for protein content. The protein content of each seed line based on total nitrogen elemental analysis was plotted on the x-axis of the calibration curve. The y-axis of the calibration curve represented the predicted values based on the best-fit line. Data points were continually added to the calibration curve data set.

[0197] T₂ seed from each transgenic plant line was analyzed by FT-NIR spectroscopy. Sarstedt tubes containing seeds were placed directly on the lamp, and spectra were acquired through the bottom of the tube. The spectra were analyzed to determine seed protein content using the FT-NIR chemometrics software (Bruker Optics) and the protein calibration curve. Results for experimental samples were compared to population means and standard deviations calculated for transgenic seed lines that were planted within 30 days of the lines being analyzed and grown under the same conditions. Typically, results from three to four events of each of 400 to 1600 different transgenic lines were used to calculate a population mean. Each data point was assigned a z-score (z=(x−mean)/std), and a p-value was calculated for the z-score.

[0198] Transgenic seed lines with protein levels in T₂ seed that differed by more than two standard deviations from the population mean were selected for evaluation of protein levels in the T₃ generation. All events of selected lines were planted in individual pots. The pots were arranged randomly in flats along with pots containing matched control plants in order to minimize microenvironment effects. Matched control plants contained an empty version of the vector used to generate the transgenic seed lines. T₃ seed from up to five plants from each event was collected and analyzed individually using FT-NIR spectroscopy. Data from replicate samples were averaged and compared to controls using the Student's t-test.

### Example 3

### Analysis of Oil Content in Transgenic Arabidopsis Seeds

[0199] An analytical method based on Fourier transform near-infrared (FT-NIR) spectroscopy was developed, validated, and used to perform a high-throughput screen of transgenic seed lines for alterations in seed oil content. To calibrate the FT-NIR spectroscopy method, a sub-population of transgenic seed lines was randomly selected and analyzed for oil content using a direct primary method. Fatty acid methyl ester (FAME) analysis by gas chromatography-mass spectroscopy (GC-MS) was used as the direct primary method to determine the total fatty acid content for each seed line and produce the FT-NIR spectroscopy calibration curves for oil.

[0200] To analyze seed oil content using GC-MS, seed tissue was homogenized in liquid nitrogen using a mortar and pestle to create a powder. The tissue was weighed, and 5.0±0.25 mg were transferred into a 2 mL Eppendorf tube. The exact weight of each sample was recorded. One mL of 2.5% H₂SO₄ (v/v in methanol) and 20 μL of undecanoic acid internal standard (1 mg/mL in hexane) were added to the weighed seed tissue. The tubes were incubated for two hours at 90° C. in a pre-equilibrated heating block. The samples were removed from the heating block and allowed to cool to room temperature. The contents of each Eppendorf tube were poured into a 15 mL polypropylene conical tube, and 1.5 ml, of a 0.9% NaCl solution and 0.75 mL of hexane were added to each tube. The tubes were vortexed for 30 seconds and incubated at room temperature for 15 minutes. The samples were then centrifuged at 4,000 rpm for 5 minutes using a bench top centrifuge. If emulsions remained, then the centrifugation step was repeated until they were dissipated. One hundred μL of the hexane (top) layer was pipetted into a 1.5 mL autosampler vial with minimum volume insert. The samples were stored no longer than 1 week at −80° C. until they were analyzed.

[0201] Samples were analyzed using a Shimadzu QP-2010 GC-MS (Shimadzu Scientific Instruments, Columbia, Md.). The first and last sample of each batch consisted of a blank (hexane). Every fifth sample in the batch also consisted of a blank. Prior to sample analysis, a 7-point calibration curve was generated using the Supelco 37 component FAME mix (0.00004 mg/mL to 0.2 mg/mL). The injection volume was 1 μL.

[0202] The GC parameters were as follows: column oven temperature: 70° C., inject temperature: 230° C., inject mode: split, flow control mode: linear velocity, column flow: 1.0 mL/min, pressure: 53.5 mL/min, total flow: 29.0 mL/min, purge flow: 3.0 mL/min, split ratio: 25.0. The temperature gradient was as follows: 70° C. for 5 minutes, increasing to 350° C. at a rate of 5 degrees per minute, and then held at 350° C. for 1 minute. The MS parameters were as follows: ion source temperature: 200° C., interface temperature: 240° C., solvent cut time: 2 minutes, detector gain mode: relative, detector gain: 0.6 kV, threshold: 1000, group: 1, start time: 3 minutes, end time: 62 minutes, ACQ mode: scan, interval: 0.5 second, scan speed: 666 amu/sec., start M/z: 40, end M/z: 350. The instrument was tuned each time the column was cut or a new column was used.

[0203] The data were analyzed using the Shimadzu GC-MS Solutions software. Peak areas were integrated and exported to an Excel spreadsheet. Fatty acid peak areas were normalized to the internal standard, the amount of tissue weighed, and the slope of the corresponding calibration curve generated using the FAME mixture. Peak areas were also multiplied by the volume of hexane (0.75 mL) used to extract the fatty acids.

[0204] The same seed lines that were analyzed using GC-MS were also analyzed by FT-NIR spectroscopy, and the oil values determined by the GC-MS primary method were entered into the FT-NIR chemometrics software (Bruker Optics, Billerica, Mass.) to create a calibration curve for oil content. The actual oil content of each seed line analyzed using GC-MS was plotted on the x-axis of the calibration curve. The y-axis of the calibration curve represented the predicted values based on the best-fit line. Data points were continually added to the calibration curve data set.

[0205] T₂ seed from each transgenic plant line was analyzed by FT-NIR spectroscopy. Sarstedt tubes containing seeds were placed directly on the lamp, and spectra were acquired through the bottom of the tube. The spectra were analyzed to determine seed oil content using the FT-NIR chemometrics software (Bruker Optics) and the oil calibration curve. Results for experimental samples were compared to population means and standard deviations calculated for transgenic seed lines that were planted within 30 days of the lines being analyzed and grown under the same conditions. Typically, results from three to four events of each of 400 to 1600 different transgenic lines were used to calculate a population mean. Each data point was assigned a z-score (z=(x−mean)/std), and a p-value was calculated for the z-score.

[0206] Transgenic seed lines with protein levels in T₂ seed that differed by more than two standard deviations from the population mean were also analyzed to determine oil levels in the T₃ generation. Events of selected lines were planted in individual pots. The pots were arranged randomly in flats along with pots containing matched control plants in order to minimize microenvironment effects. Matched control plants contained an empty version of the vector used to generate the transgenic seed lines. T₃ seed from up to five plants from each event was collected and analyzed individually using FT-NIR spectroscopy. Data from replicate samples were averaged and compared to controls using the Student's t-test.

### Example 4

### Results for ME11370 Events

[0207] T₂ and T₃ seed from five events of ME11370 containing ANNOT ID 826303 was analyzed for total protein content using FT-NIR spectroscopy as described in Example 2.

[0208] The protein content in T₂ seed from five events of ME11370 was significantly increased compared to the mean protein content in seed from transgenic Arabidopsis lines planted within 30 days of ME11370. As presented in Table 1, the protein content was increased to 136%, 122%, 145%, 120%, and 159% in seed from events-01, -02, -03, -04 and -05, respectively, compared to the population mean.

TABLE 1
Protein content (% control) in T₂ and T₃ seed from
ME11370 events containing ANNOT ID 826303

| | Event -01 | Event -02 | Event -03 | Event -04 | Event -05 | Control |
|---|---|---|---|---|---|---|
| Protein content | 136 | 122 | 145 | 120 | 159 | 100 ± 19* |
| (% control) in T₂ seed | | | | | | |
| p-value | <0.01 | <0.01 | <0.01 | <0.01 | <0.01 | N/A |
| Protein content | 117 ± 4 | 130 ± 2 | 124 ± 5 | 122 | 118 ± 2 | 100 ± 4 |
| (% control) in T₃ seed | | | | | | |
| p-value | 0.01 | <0.01 | <0.01 | N/A | 0.01 | N/A |
| No. of T₂ plants | 4 | 4 | 4 | 2 | 3 | 20 |

*Population mean of the protein content in seed from transgenic lines planted within 30 days of ME11370. Variation is presented as the standard error of the mean.

[0209] The protein content in T₃ seed from four events of ME11370 was significantly increased compared to the protein content in corresponding control seed. As presented in Table 1, the protein content was increased to 117%, 130%, 124%, and 118% in seed from events-01, -02, -03 and -05, respectively, compared to the protein content in control seed.

[0210] T₂ and T₃ seed from five events of ME11370 containing ANNOT ID 826303 was also analyzed for total oil content using FT-NIR spectroscopy as described in Example 3.

[0211] The oil content in T₂ seed from ME11370 events was not observed to differ significantly from the mean oil content in seed from transgenic Arabidopsis lines planted within 30 days of ME11370 (Table 2).

TABLE 2
Oil content (% control) in T₂ and T₃ seed from
ME11370 events containing ANNOT ID 826303

| | Event -01 | Event -02 | Event -03 | Event -04 | Event -05 | Control |
|---|---|---|---|---|---|---|
| Oil content | 93 | 111 | 102 | 102 | 91 | 100 ± 9* |
| (% control) in T₂ seed | | | | | | |
| p-value | 0.26 | 0.45 | 0.48 | 0.49 | 0.44 | N/A |
| Oil content | 98 ± 2 | 98 ± 2 | 96 ± 1 | 97 ± 2 | 96 ± 3 | 100 ± 1 |
| (% control) in T₃ seed | | | | | | |
| p-value | 0.46 | 0.34 | 0.01 | 0.28 | 0.38 | N/A |
| No. of T₂ plants | 4 | 4 | 4 | 2 | 3 | 20 |

*Population mean of the oil content in seed from transgenic lines planted within 30 days of ME11370. Variation is presented as the standard error of the mean.

[0212] The oil content in T₃ seed from one event of ME11370 was significantly decreased compared to the oil content in corresponding control seed. As presented in Table 2, the oil content was decreased to 96% in seed from event-03 compared to the oil content in control seed.

[0213] The physical appearances of T₁ ME11370 plants were similar to those of corresponding control plants. There were no observable or statistically significant differences between T₂ plants from events-01, -03, and -05 of ME11370 and control plants in germination, onset of flowering, rosette area, fertility, and general morphology/architecture. The seed yield of T₂ plants from events-03 and -05 was comparable to that of control plants, while the seed yield of plants from event-01 was lower.

### Example 5

### Results for ME11410 Events

[0214] T₂ and T₃ seed from three events and two events, respectively, of ME11410 containing ANNOT ID 842015 was analyzed for total protein content using FT-NIR spectroscopy as described in Example 2.

[0215] The protein content in T₂ seed from three events of ME11410 was significantly increased compared to the mean protein content in seed from transgenic Arabidopsis lines planted within 30 days of ME11410. As presented in Table 3, the protein content was increased to 144%, 145%, and 136% in seed from events-02, -03, and -05, respectively, compared to the population mean.

TABLE 3
Protein content (% control) in T₂ and T₃ seed from
ME11410 events containing ANNOT ID 842015

| | Event -02 | Event -03 | Event -05 | Control |
|---|---|---|---|---|
| Protein content | 144 | 145 | 136 | 100 ± 18* |
| (% control) in T₂ seed | | | | |
| p-value | 0.01 | <0.01 | 0.01 | N/A |
| Protein content | 122 ± 4 | No data | 131 ± 5 | 100 ± 4 |
| (% control) in T₃ seed | | | | |
| p-value | 0.01 | No data | 0.02 | N/A |
| No. of T₂ plants | 4 | No data | 3 | 15 |

*Population mean of the protein content in seed from transgenic lines planted within 30 days of ME11410. Variation is presented as the standard error of the mean.

[0216] The protein content in T₃ seed from two events of ME11410 was significantly increased compared to the protein content in corresponding control seed. As presented in Table 3, the protein content was increased to 122% and 131% in seed from events-02 and -05, respectively, compared to the protein content in control seed.

[0217] T₂ and T₃ seed from three events of ME11410 containing ANNOT ID 842015 was also analyzed for total oil content using FT-NIR spectroscopy as described in Example 3.

[0218] The oil content in T₂ seed from ME11410 events was not observed to differ significantly from the mean oil content in seed from transgenic Arabidopsis lines planted within 30 days of ME11410 (Table 4).

TABLE 4
Oil content (% control) in T₂ and T₃ seed from
ME11410 events containing ANNOT ID 842015

| | Event -02 | Event -03 | Event -05 | Control |
|---|---|---|---|---|
| Oil content | 102 | 104 | 105 | 100 ± 9* |
| (% control) in T₂ seed | | | | |
| p-value | 0.57 | 0.46 | 0.43 | N/A |
| Oil content | 96 ± 1 | No data | 98 ± 1 | 100 ± 1 |
| (% control) in T₃ seed | | | | |
| p-value | 0.01 | No data | 0.21 | N/A |
| No. of T₂ plants | 4 | No data | 3 | 20 |

*Population mean of the oil content in seed from transgenic lines planted within 30 days of ME11410. Variation is presented as the standard error of the mean.

[0219] The oil content in T₃ seed from one event of ME11410 was significantly decreased compared to the oil content in corresponding control seed. As presented in Table 4, the oil content was decreased to 96% in seed from event-02 compared to the oil content in control seed.

[0220] The physical appearances of T₁ ME11410 plants were similar to those of corresponding control plants. There were no observable or statistically significant differences between T₃ ME11410 and control plants in germination, onset of flowering, rosette area, fertility, general morphology/architecture, and seed yield.

### Example 6

### Results for ME02482 Events

[0221] T₂ and T₃ seed from five events of ME02482 containing CLONE ID 97982 was analyzed for total protein content using FT-NIR spectroscopy as described in Example 2.

[0222] The protein content in T₂ seed from four events of ME02482 was significantly increased compared to the mean protein content of seed from transgenic Arabidopsis lines planted within 30 days of ME02482. As presented in Table 5, the protein content was increased to 130% in seed from events-12 and -13, and to 128% and 135% in seed from events-16 and -19, respectively, compared to the population mean.

TABLE 5
Protein content (% control) in T₂ and T₃ seed
from ME02482 events containing CLONE ID 97982

| | Event -12 | Event -13 | Event -14 | Event -16 | Event -19 | Control |
|---|---|---|---|---|---|---|
| Protein content | 130 | 130 | 129 | 128 | 135 | 100 ± 13* |
| (% control) in T₂ seed | | | | | | |
| p-value | 0.049 | 0.047 | 0.06 | 0.04 | 0.02 | N/A |
| Protein content | 101 ± 1 | 104 ± 3 | 103 ± 5 | 109 ± 3 | 107 ± 2 | 100 ± 1 |
| (% control) in T₃ seed | | | | | | |
| p-value | 0.21 | 0.12 | 0.40 | 0.04 | 0.01 | N/A |
| No. of T₂ plants | 5 | 4 | 4 | 5 | 5 | 15 |

*Population mean of the protein content in seed from transgenic lines planted within 30 days of ME02482. Variation is presented as the standard error of the mean.

[0223] The protein content in T₃ seed from two events of ME02482 was significantly increased compared to the protein content in corresponding control seed. As presented in Table 5, the protein content was increased to 109% and 107% in seed from events-16 and -19, respectively.

[0224] T₂ and T₃ seed from five events of ME02482 containing CLONE ID 97982 was also analyzed for total oil content using FT-NIR spectroscopy as described in Example 3. The oil content in T₂ seed from ME02482 events was not observed to differ significantly from the mean oil content in seed from transgenic Arabidopsis lines planted within 30 days of ME02482 (Table 6).

TABLE 6
Oil content (% control) in T₂ and T₃ seed from
ME02482 events containing CLONE ID 97982

| | Event -12 | Event -13 | Event -14 | Event -16 | Event -19 | Control |
|---|---|---|---|---|---|---|
| Oil content | 93 | 98 | 95 | 104 | 99 | 100 ± 1* |
| (% control) in T₂ seed | | | | | | |
| p-value | 0.15 | 0.42 | 0.24 | 0.21 | 0.48 | N/A |
| Oil content | 92 ± 1 | 95 ± 1 | 92 ± 5 | 91 ± 2 | 93 ± 1 | 100 ± 2 |
| (% control) in T₃ seed | | | | | | |
| p-value | <0.01 | <0.01 | 0.04 | <0.01 | <0.01 | N/A |
| No. of T₂ plants | 5 | 4 | 4 | 5 | 5 | 15 |

*Population mean of the oil content in seed from transgenic lines planted within 30 days of ME02482. Variation is presented as the standard error of the mean.

[0225] The oil content in T₃ seed from five events of ME02482 was significantly decreased compared to the oil content in corresponding control seed. As presented in Table 6, the oil content was decreased to 92% in seed from events-12 and -14, and to 95%, 91%, and 93% in seed from events-13, -16, and -19, respectively, compared to the oil content in corresponding control seed.

[0226] The physical appearances of T₁ ME02482 plants were similar to those of corresponding control plants. There were no observable or statistically significant differences between T₂ plants from events-16 and -19 of ME02482 and control plants in germination, onset of flowering, rosette area, fertility, general morphology/architecture, or seed yield.

### Example 7

### Results for ME11409 Events

[0227] T₂ and T₃ seed from four events of ME11409 containing ANNOT ID 571199 was analyzed for total protein content using FT-NIR spectroscopy as described in Example 2.

[0228] The protein content in T₂ seed from three events of ME11409 was significantly increased compared to the mean protein content in seed from transgenic Arabidopsis lines planted within 30 days of ME11409. As presented in Table 7, the protein content was increased to 134%, 133%, and 127% in seed from events-03, -04, and -05, respectively, compared to the population mean.

TABLE 7
Protein content (% control) in T₂ and T₃ seed
from ME11409 events containing ANNOT ID 571199

| | Event -01 | Event -03 | Event -04 | Event -05 | Control |
|---|---|---|---|---|---|
| Protein content | 125 | 134 | 133 | 127 | 100 ± 18* |
| (% control) in T₂ seed | | | | | |
| p-value | 0.11 | 0.02 | 0.03 | 0.04 | N/A |
| Protein content | 126 | 122 | 124 ± 1 | 136 ± 4 | 100 ± 4 |
| (% control) in T₃ seed | | | | | |
| p-value | N/A | N/A | <0.01 | 0.01 | N/A |
| No. of T₂ plants | 2 | 2 | 5 | 3 | 15 |

*Population mean of the protein content in seed from transgenic lines planted within 30 days of ME11409. Variation is presented as the standard error of the mean.

[0229] The protein content in T₃ seed from four events of ME was increased compared to the protein content in corresponding control seed. As presented in Table 7, the protein content was increased to 126%, 122%, 124%, and 136% in seed from events-01, -03, -04 and -05, respectively, compared to the protein content in control seed.

[0230] T₂ and T₃ seed from four events of ME11409 containing ANNOT ID 571199 was also analyzed for total oil content using FT-NIR spectroscopy as described in Example 3. The oil content in T₂ seed from ME11409 events was not observed to differ significantly from the mean oil content in seed from transgenic Arabidopsis lines planted within 30 days of ME11409 (Table 8).

TABLE 8
Oil content (% control) in T₂ and T₃ seed from
ME11409 events containing ANNOT ID 571199

| | Event -01 | Event -03 | Event -04 | Event -05 | Control |
|---|---|---|---|---|---|
| Oil content | 101 | 102 | 104 | 105 | 100 ± 9* |
| (% control) in T₂ seed | | | | | |
| p-value | 0.66 | 0.57 | 0.46 | 0.43 | N/A |
| Oil content | 87 | 97 | 90 ± 1 | 113 ± 3 | 100 ± 1 |
| (% control) in T₃ seed | | | | | |
| p-value | N/A | N/A | <0.01 | 0.03 | N/A |
| No. of T₂ plants | 2 | 2 | 5 | 3 | 20 |

*Population mean of the oil content in seed from transgenic lines planted within 30 days of ME11409. Variation is presented as the standard error of the mean.

[0231] The oil content in T₃ seed from three events of ME11409 was decreased compared to the oil content in corresponding control seed. As presented in Table 8, the oil content was decreased to 87%, 97%, and 90% in seed from events-01, -03, and -04, respectively, compared to the oil content in control seed. The oil content in T₃ seed from one event of ME11409 was significantly increased compared to the oil content in corresponding control seed. As presented in Table 8, the oil content was increased to 113% in T₃ seed from event-05 compared to the oil content in control seed.

[0232] The physical appearances of T₁ ME11409 plants were similar to those of corresponding control plants. There were no observable or statistically significant differences between T₃ ME11409 and control plants in germination, onset of flowering, rosette area, fertility, or general morphology/architecture. The seed yield of plants from event-04 was comparable to that of control plants, while the seed yield of plants from event-05 was lower.

### Example 8

### Results for ME10870 Events

[0233] T₂ and T₃ seed from three events of ME10870 containing ANNOT ID 564367 was analyzed for total protein content using FT-NIR spectroscopy as described in Example 2.

[0234] The protein content in T₂ seed from three events of ME10870 was significantly increased compared to the mean protein content in seed from transgenic Arabidopsis lines planted within 30 days of ME10870. As presented in Table 9, the protein content was increased to 141%, 134%, and 154% in seed from events-02, -03, and -04, respectively, compared to the population mean.

TABLE 9
Protein content (% control) in T₂ and T₃ seed
from ME10870 events containing ANNOT ID 564367

| | Event -02 | Event -03 | Event -04 | Control |
|---|---|---|---|---|
| Protein content | 141 | 134 | 154 | 100 ± 19* |
| (% control) in T₂ seed | | | | |
| p-value | 0.02 | 0.04 | 0.01 | N/A |
| Protein content | 108 ± 1 | 106 ± 1 | 100 ± 2 | 100 ± 1 |
| (% control) in T₃ seed | | | | |
| p-value | <0.01 | <0.01 | 0.91 | N/A |
| No. of T₂ plants | 5 | 5 | 3 | 15 |

*Population mean of the protein content in seed from transgenic lines planted within 30 days of ME10870. Variation is presented as the standard error of the mean.

[0235] The protein content in T₃ seed from two events of ME10870 was significantly increased compared to the protein content in corresponding control seed. As presented in Table 9, the protein content was increased to 108% and 106% in seed from events-02 and -03, respectively, compared to the protein content in control seed.

[0236] T₂ and T₃ seed from three events of ME10870 containing ANNOT ID 564367 was also analyzed for total oil content using FT-NIR spectroscopy as described in Example 3.

[0237] The oil content in T₂ seed from one event of ME10870 was significantly decreased compared to the mean oil content in seed from transgenic Arabidopsis lines planted within 30 days of ME10870. As presented in Table 10, the oil content was decreased to 74% in seed from event-04 compared to the population mean.

TABLE 10
Oil content (% control) in T₂ and T₃ seed from
ME10870 events containing ANNOT ID 564367

| | Event -02 | Event -03 | Event -04 | Control |
|---|---|---|---|---|
| Oil content | 82 | 94 | 74 | 100 ± 9* |
| (% control) in T₂ seed | | | | |
| p-value | 0.12 | 0.49 | 0.03 | N/A |
| Oil content | 97 ± 1 | 96 ± 4 | 96 ± 2 | 100 ± 2 |
| (% control) in T₃ seed | | | | |
| p-value | 0.09 | 0.38 | 0.15 | N/A |
| No. of T₂ plants | 5 | 5 | 3 | 15 |

*Population mean of the oil content in seed from transgenic lines planted within 30 days of ME10870. Variation is presented as the standard error of the mean.

[0238] The oil content in T₃ seed from ME10870 events was not observed to differ significantly from the oil content in control seed (Table 10).

[0239] The physical appearances of T₁ ME10870 plants were similar to those of corresponding control plants. There were no observable or statistically significant differences between T₃ ME10870 and control plants in germination, onset of flowering, rosette area, fertility, general morphology/architecture, or seed yield.

### Example 9

### Results for ME11351 Events

[0240] T₂ and T₃ seed from four events of ME11351 containing ANNOT ID 851745 was analyzed for total protein content using FT-NIR spectroscopy as described in Example 2.

[0241] The protein content in T₂ seed from three events of ME11351 was significantly increased compared to the mean protein content in seed from transgenic Arabidopsis lines planted within 30 days of ME11351. As presented in Table 11, the protein content was increased to 147%, 141%, and 134% in seed from events-02, -03, and -05, respectively, compared to the population mean.

TABLE 11
Protein content (% control) in T₂ and T₃ seed
from ME11351 events containing ANNOT ID 851745

| | Event -01 | Event -02 | Event -03 | Event -05 | Control |
|---|---|---|---|---|---|
| Protein content | 132 | 147 | 141 | 134 | 100 ± 19* |
| (% control) in T₂ seed | | | | | |
| p-value | 0.138 | 0.02 | 0.045 | 0.03 | N/A |
| Protein content | 103 ± 4 | 109 ± 1 | 104 | 106 ± 1 | 100 ± 1 |
| (% control) in T₃ seed | | | | | |
| p-value | 0.54 | <0.01 | N/A | <0.01 | N/A |
| No. of T₂ plants | 3 | 5 | 1 | 5 | 15 |

*Population mean of the protein content in seed from transgenic lines planted within 30 days of ME11351. Variation is presented as the standard error of the mean.

[0242] The protein content in T₃ seed from two events of ME11351 was significantly increased compared to the protein content in corresponding control seed. As presented in Table 11, the protein content was increased to 109% and 106% in seed from events-02 and -05, respectively, compared to the protein content in control seed.

[0243] T₂ and T₃ seed from four events of ME11351 containing ANNOT ID 851745 was also analyzed for total oil content using FT-NIR spectroscopy as described in Example 3. The oil content in T₂ and T₃ seed from ME11351 events was not observed to differ significantly from the oil content in corresponding control seed (Table 12).

TABLE 12
Oil content (% control) in T₂ and T₃ seed from
ME11351 events containing ANNOT ID 851745

| | Event -01 | Event -02 | Event -03 | Event -05 | Control |
|---|---|---|---|---|---|
| Oil content | 95 | 101 | 105 | 104 | 100 ± 9* |
| (% control) in T₂ seed | | | | | |
| p-value | 0.16 | 0.33 | 0.48 | 0.44 | N/A |
| Oil content | 100 ± 1 | 97 ± 2 | 101 | 98 ± 2 | 100 ± 2 |
| (% control) in T₃ seed | | | | | |
| p-value | 0.96 | 0.11 | N/A | 0.38 | N/A |
| No. of T₂ plants | 3 | 5 | 1 | 5 | 15 |

*Population mean of the oil content in seed from transgenic lines planted within 30 days of ME11351. Variation is presented as the standard error of the mean.

[0244] The physical appearances of T₁ ME11351 plants were similar to those of corresponding control plants. There were no observable or statistically significant differences between T₃ ME11351 and control plants in germination, onset of flowering, rosette area, fertility, general morphology/architecture, or seed yield.

### Example 10

### Results for ME07978 Events

[0245] T₂ and T₃ seed from five events of ME07978 containing 3′-truncated CLONE ID 258034 was analyzed for total protein content using FT-NIR spectroscopy as described in Example 2.

[0246] The protein content in T₂ seed from five events of ME07978 was significantly increased compared to the mean protein content in seed from transgenic Arabidopsis lines planted within 30 days of ME07978. As presented in Table 13, the protein content was increased to 127%, 132%, 129%, 134%, and 125% in seed from events-01, -02, -03, -04, and -05, respectively, compared to the population mean.

TABLE 13
Protein content (% control) in T₂ and T₃ seed from ME07978
events containing 3′ truncated CLONE ID 258034

| | Event -01 | Event -02 | Event -03 | Event -04 | Event -05 | Control |
|---|---|---|---|---|---|---|
| Protein content | 127 | 132 | 129 | 134 | 125 | 100 ± 15* |
| (% control) in T₂ seed | | | | | | |
| p-value | 0.04 | 0.02 | 0.03 | 0.01 | 0.05 | N/A |
| Protein content | 97 ± 1 | 107 ± 2 | 101 ± 3 | 111 ± 0 | 107 ± 4 | 100 ± 4 |
| (% control) in T₃ seed | | | | | | |
| p-value | 0.03 | 0.01 | 0.76 | <0.01 | 0.26 | N/A |

*Population mean of the protein content in seed from transgenic lines planted within 30 days of ME07978. Variation is presented as the standard error of the mean.

[0247] The protein content in T₃ seed from two events of ME07978 was significantly increased compared to the protein content in corresponding control seed. As presented in Table 13, the protein content was increased to 107% and 111% in seed from events-02 and -04, respectively, compared to the protein content in control seed. The protein content in T₃ seed from one event of ME07978 was significantly decreased compared to the protein content in corresponding control seed. As presented in Table 13, the protein content was decreased to 97% in seed from event-01 compared to the protein content in control seed.

### Example 11

### Determination of Functional Homolog and/or Ortholog Sequences

[0248] A subject sequence was considered a functional homolog or ortholog of a query sequence if the subject and query sequences encoded proteins having a similar function and/or activity. A process known as Reciprocal BLAST (Rivera et al., Proc. Natl. Acad. Sci. USA, 95:6239-6244 (1998)) was used to identify potential functional homolog and/or ortholog sequences from databases consisting of all available public and proprietary peptide sequences, including NR from NCBI and peptide translations from Ceres clones.

[0249] Before starting a Reciprocal BLAST process, a specific query polypeptide was searched against all peptides from its source species using BLAST in order to identify polypeptides having BLAST sequence identity of 80% or greater to the query polypeptide and an alignment length of 85% or greater along the shorter sequence in the alignment. The query polypeptide and any of the aforementioned identified polypeptides were designated as a cluster.

[0250] The BLASTP version 2.0 program from Washington University at Saint Louis, Mo., USA was used to determine BLAST sequence identity and E-value. The BLASTP version 2.0 program includes the following parameters: 1) an E-value cutoff of 1.0e-5; 2) a word size of 5; and 3) the -postsw option. The BLAST sequence identity was calculated based on the alignment of the first BLAST HSP (High-scoring Segment Pairs) of the identified potential functional homolog and/or ortholog sequence with a specific query polypeptide. The number of identically matched residues in the BLAST HSP alignment was divided by the HSP length, and then multiplied by 100 to get the BLAST sequence identity. The HSP length typically included gaps in the alignment, but in some cases gaps were excluded.

[0251] The main Reciprocal BLAST process consists of two rounds of BLAST searches; forward search and reverse search. In the forward search step, a query polypeptide sequence, “polypeptide A,” from source species SA was BLASTed against all protein sequences from a species of interest. Top hits were determined using an E-value cutoff of 10⁻⁵ and a sequence identity cutoff of 35%. Among the top hits, the sequence having the lowest E-value was designated as the best hit, and considered a potential functional homolog or ortholog. Any other top hit that had a sequence identity of 80% or greater to the best hit or to the original query polypeptide was considered a potential functional homolog or ortholog as well. This process was repeated for all species of interest.

[0252] In the reverse search round, the top hits identified in the forward search from all species were BLASTed against all protein sequences from the source species SA. A top hit from the forward search that returned a polypeptide from the aforementioned cluster as its best hit was also considered as a potential functional homolog or ortholog.

[0253] Functional homologs and/or orthologs were identified by manual inspection of potential functional homolog and/or ortholog sequences. Representative functional homologs and/or orthologs for SEQ ID NO:96, SEQ ID NO:102, SEQ ID NO:118, and SEQ ID NO:128 are shown in FIGS. 1-4, respectively. The BLAST percent identities and E-values of functional homologs and/or orthologs to SEQ ID NO:96, SEQ ID NO:102, SEQ ID NO:118, and SEQ ID NO:128 are shown below in Tables 14-17, respectively. The BLAST sequence identities and E-values given in Tables 14-17 were taken from the forward search round of the Reciprocal BLAST process.

TABLE 14
Percent identity to ANNOT ID 826303 (SEQ ID NO: 96)

| | | SEQ | % | |
|---|---|---|---|---|
| Designation | Species | ID NO: | Identity | e-value |
| Ceres CLONE | Glycine max | 97 | 58.5 | 3.10E−75 |
| ID no. 1103899 | | | | |
| Ceres CLONE | Zea mays | 98 | 56.1 | 8.90E−69 |
| ID no. 463034 | | | | |
| Ceres CLONE | Panicum virgatum | 100 | 52 | 2.69E−67 |
| ID no. 1816436 | | | | |

TABLE 15
Percent identity to ANNOT ID 571199 (SEQ ID NO: 102)

| | | SEQ | % | |
|---|---|---|---|---|
| Designation | Species | ID NO: | Identity | e-value |
| Public GI | Arabidopsis thaliana | 103 | 99.7 | 9.79E−182 |
| no. 110737799 | | | | |
| Ceres ANNOT | Populus balsamifera | 106 | 68.1 | 7.20E−115 |
| ID no. 1469254 | subsp. trichocarpa | | | |
| Public GI | Medicago truncatula | 107 | 67 | 2.09E−108 |
| no. 92895842 | | | | |
| Ceres CLONE | Glycine max | 108 | 66.1 | 4.19E−110 |
| ID no. 1121764 | | | | |
| Public GI | Oryza sativa subsp. | 109 | 65.1 | 1.00E−90 |
| no. 33146851 | japonica | | | |
| Ceres CLONE | Zea mays | 110 | 60.9 | 3.10E−98 |
| ID no. 278526 | | | | |

TABLE 16
Percent identity to ANNOT ID 564367 (SEQ ID NO: 118)

| | | SEQ | % | |
|---|---|---|---|---|
| Designation | Species | ID NO: | Identity | e-value |
| Ceres CLONE | Glycine max | 119 | 56.4 | 9.79E−47 |
| ID no. 594825 | | | | |
| Ceres ANNOT | Populus balsamifera | 122 | 53.8 | 4.19E−46 |
| ID no. 1539862 | subsp. trichocarpa | | | |
| Ceres ANNOT | Populus balsamifera | 125 | 53.8 | 4.19E−46 |
| ID no. 1486448 | subsp. trichocarpa | | | |
| Public GI | Oryza sativa subsp. | 126 | 50.9 | 3.50E−35 |
| no. 115479583 | japonica | | | |

TABLE 17
Percent identity to ANNOT ID 851745 (SEQ ID NO: 128)

| | | SEQ | % | |
|---|---|---|---|---|
| Designation | Species | ID NO: | Identity | e-value |
| Ceres ANNOT | Populus balsamifera | 131 | 56.1 | 2.20E−81 |
| ID no. 1455259 | subsp. trichocarpa | | | |
| Ceres CLONE | Gossypium hirsutum | 133 | 55 | 1.99E−78 |
| ID no. 1939499 | | | | |
| Ceres CLONE | Glycine max | 134 | 53.7 | 4.79E−77 |
| ID no. 605517 | | | | |

### Other Embodiments

[0254] It is to be understood that while the invention has been described in conjunction with the detailed description thereof, the foregoing description is intended to illustrate and not limit the scope of the invention, which is defined by the scope of the appended claims. Other aspects, advantages, and modifications are within the scope of the following claims.

The application's sequence listing, which the Patent Office published only in electronic form, follows.

SEQUENCE LISTING (248 sequences)

SEQ ID NO: 1 - DNA, 1823 bp, Arabidopsis thaliana
  misc_feature (1)..(1823): Ceres Promoter 21876
gtctcttaaaaaggatgaacaaacacgaaactggtggattatacaaatgtcgccttatacatatatcggttattggccaaaagagctattttaccttatggataatggtgctactatggttggagttggaggtgtagttcaggcttcaccttctggtttaagccctccaatgggtaatggtaaatttccggcaaaaggtcctttgagatcagccatgttttccaatgttgaggtcttatattccaagtatgagaaaggtaaaataaatgcgtttcctatagtggagttgctagatagtagtagatgttatgggctacgaattggtaagagagttcgattttggactagtccactcggatactttttcaattatggtggtcctggaggaatctcttgtggagtttgatatttgcgagtataatctttgaacttgtgtagattgtacccaaaaccgaaaacatatcctatataaatttcattatgagagtaaaattgtttgttttatgtatcatttctcaactgtgattgagttgactattgaaaacatatcttagataagtttcgttatgagagttaatgatgattgatgacatacacactcctttatgatggtgattcaacgttttggagaaaatttatttataatctctcataaattctccgttattagttgaataaaatcttaaatgtctcctttaaccatagcaaaccaacttaaaaatttagattttaaagttaagatggatattgtgattcaacgattaattatcgtaatgcatattgattatgtaaaataaaatctaactaccggaatttattcaataactccattgtgtgactgcatttaaatatatgttttatgtcccattaattaggctgtaatttcgatttatcaatttatatactagtattaatttaattccatagatttatcaaagccaactcatgacggctagggttttccgtcaccttttcgatcatcaagagagtttttttataaaaaaatttatacaattatacaatttcttaaccaaacaacacataattataagctatttaacatttcaaattgaaaaaaaaaatgtatgagaattttgtggatccatttttgtaattctttgttgggtaaattcacaaccaaaaaaatagaaaggcccaaaacgcgtaagggcaaattagtaaaagtagaaccacaaagagaaagcgaaaaccctagacacctcgtagctataagtaccctcgagtcgaccaggattagggtgcgctctcatatttctcacattttcgtagccgcaagactcctttcagattcttacttgcaggttagatattttctctctttagtgtctccgatcttcatcttcttatgattattgtagctgtttagggtttagattcttagttttagctctatattgactgtgattatcgcttattctttgctgttgttatactgcttttgattctctagctttagatccgtttactcgtcgatcaatattgttcctattgagtctgatgtataatcctctgattaattgatagcgtttagttttgatatcgtcttcgcatgttttttatcatgtcgatctgtatctgctctggttatagttgattctgatgtatttggttggtgatgttccttagatttgatatacctgttgtctcgtggtttgatatgatagctcaactggtgatatgtggttttgtttcagtggatctgtgtttgattatattgttgacgttttggttgttgtatggttgatggttgatgtatttttgttgattctgatgtttcgatttttgtttttgttttgacagct

SEQ ID NO: 2 - DNA, 1000 bp, Arabidopsis thaliana
  misc_feature (1)..(1000): Ceres Promoter PT0668
atagagttttactatgcttttggaatctttcttctaatgtgccaactacagagaaatacatgtattaccactaggaatcggaccatatcatagatatcaggattagataactagttctcgtcgctatcacttcgcattaagttctagtaattgttaaagattctaattttttactaaacaaaaactaaatcaacatcaaatatgcaaagtgtgtgttgtccacacaagtgactcaaagtatacgcaggtgggattggaccatattattgcaaatcgtttccgaaccactcatatttctttttttctctcctttttttatccggagaattatggaaccacttcatttcaacttcaaaactaattttttggttcagtgatcaaatacaaaaaaaaaaaaaaagttatagatattaaatagaaaactattccaatcttaaaaatacaaatgaaaccataattttaatttatacaaaactatttaattagctaagggttgtcttaacgtttagaaaataaaaaattatgattgtctgtttaaaattacaatgaatgaataaaaaaaatatgcaatgaatgaaagaataaattttgtacatccgatagaatgagaaaatgaattttgtacaaaccactcaagaattcaaaacaattgtcaaagttttcttctcagccgtgtgtcctcctctcctagccgccacatctcacacactaatgctaaccacgcgatgtaaccgtaagcgctgagtttttgcatttcagatttcacttccaccaaacaaaactcgccacgtcatcaatacgaatcattccgtataaacgtctagattctttacagcctacaatgttctcttctttggtcggccattatttaacgctttgaacctaaatctagcccagccaacgaagaagacgaagcaaatccaaaccaaagttctccattttcgtagcttctttaagctttttcagtatcatagagacacttttttttttttgattagaa

SEQ ID NO: 3 - DNA, 1000 bp, Arabidopsis thaliana
  misc_feature (1)..(1000): Ceres Promoter PT0535
ttagtgaaattatgacattaagtaaggttttcttagttagctaatgtatggctattcaattgttatgttaggctattttagttagtatatgaatttaggcagtctatgcaaatgatttcgttttcattttttcatatgtaaacatcaagatcaagtaacgccattcgagttgatattttttttttaaattagtgtgtgtaaattttggaccgcttatttgagtttgctaatgaagttgcatatatattacgttaaaccataggcaaactaatttgaaacatccgattcgatttcctgtaatttttcttggttaattgaccaaaatcaagatcttcagaaataaaataaaagacgaaagaaagctgtcgcaaagcagattgtgttaaaaaaaagtggattgggctcaaacgcaacttgtccagcccgtgacaattaccctatacgcaagtaagagtaacgtatcactggcaaaagttggtattagttacgatatctttgtcatgggggcatgcatgggcatggcttaagagttaagccttaagaagagtcccacactcgtgactctcatgatcacttgttgtttcttacgggcaaatacatttaactttattcttcatttattcacctatattcttttggataataacttttctctatataaaataacaaacatcgtacgtttcatttatttacaacaagcgatgagaattaaaaggagaccttaattgatgatactcttcttttctctcggttacaacgggattattacagataatgataatctatatggatgctgacgtggaaaaacaaaatttggtgaaacacgtcaattaagcacgacttttccatggctagtggctaagatcgtttcatcacatggctatatcatataatacttggatgaattcaaaataaacgactgagaaaatgtccacgtcacggcgcaccgctttggacttaagtctcctataataaatacaacaccaaacattgcattcca

SEQ ID NO: 4 - DNA, 999 bp, Arabidopsis thaliana
  misc_feature (1)..(999): Ceres Promoter PT0585
tgaagtcatttaatatgagtttgacattaggtaaacctaatctatgagattatagaatgtagcaaaactatcaatgtttcttttccaaaatattttgtggtttttctttttggttcattatgttttgttatttgtgaattattttaatatgaagtaattatattgattttatatgatatacatattattttgatataaaatttaacacttatccattaaaatagcatgggcataatcaaaatcgggactattacgatgaaaaagatagttaaattgtatgataaaataaaatgtgtaagattaaaattttgggttttagaaaattactaaacaaaatatagacaaagtatgttgactattatttaaaatttaaatatcatcaataagatatagttaaagtcattaagtgtatagcaaaatgaaaattctaagattaaaattcgattaaaattttttttactaaattaaatatttaaaaatagggattatcatttactatttacaattctaatatcatgggtaaaaattgataactttttttaaacccgcctatctaggtgggcctaacctagtttactaattactatatgattaacttattaccacttttacttcttcttttttggtcaaattactttattgttttttataaagtcaaattactctttgcattgtaaataatagtagtaactaaaatcttaaaacaaaatattcaacctttcccattattggaatggtaatgtcttcaacaccattgaccaacgttaaggaatgtcttttaatatttttggaacctaaatgctaatactgtataccacaatcacttatgagtattgaagttgagatagaggaggtacaaggagaccttatctgcagaagacaaaaagccatttttagcaaaactaaagaaagaaaaaagattgaaacacaaatatgcgccactcgtagtccacccctatctctttggcaaaagccacttcactctttttccctttttat

SEQ ID NO: 5 - DNA, 1000 bp, Arabidopsis thaliana
  misc_feature (1)..(1000): Ceres Promoter PT0613
ttaatactaacattgtagaaagccacaaaaaagaaattgaaatgtgagtagatgctgagtcagaggtttggtcaatacacaacagctaattgagataatattatacacgtcacgatgacttgttttttctcctcccaacttgttaatttctttattcttaaaattaaaccatcgcaaaaacagaagaacacagctgtttttctcgactcccaatttctattttgctgctaaggacatttcatttcattatttcccaattcaggactccttagattttcctaaatttgttttcctaacttgctctctctcattctaacattttctcatttttttagattatcttgtactttttagtagattattttatcaggttttacaaacatacattgacattctaaaaagggcttctaaaaattcagtgtggaatgctgatatactaaaaaaaggtcatgcaaaattatctacgatttatctaaaattagataatttgccatatataactattaactaataatcgatcctttgattttttgtttagataaaacgaaacagctatatcttttttttttgttatcggattttaatcgaataaaagctgaaaaataacagttatatcttcttcttttttaactaatgaaacagttatatcttaaacaaacaacagaaacagtaaaatattaatgcaaatccgcgtcaagagataaattttaacaaactaataacaattgagataagattagcgcaaaagaaactctaattttagagcgtgtaaacacaaacacgtcttgaaagtaaacgtgaattacacgcttctaaaacgagcgtgagttttggttataacgaagatacggtgaagtgtgacacctttctacgttaatttcagtttgaggacacaactcaagttatgtttgatatctaaggacttgcactgtctccaaatctgcaggaaggactttttgattggatcaatataaataccatctccattctcgtctccttc

SEQ ID NO: 6 - DNA, 351 bp, Arabidopsis thaliana
  misc_feature (1)..(351): Ceres Promoter PT0625
gatcatgatcagtttcaactcgctgtgcccacgtgtcgagagatcggcacgtgcctgagctctcagccgctcataaatacacttgtttagtagcaacagtatactatagtagtcctctcctgtttggcttttagcttgcatcgatggatggatggatggatcgcatgagagggcttcgcgaaggtacggaaccttacacaacgcgtgtcctttctacgtggccatcgtgtaggcgtctcgccatgctacgtgtcccggaggatgtctcgatgccaacccttataaatactgttccattccaatcccatcgccacagccagtgcaaatctgatcgatcaagataatcgagca

SEQ ID NO: 7 - DNA, 1022 bp, Arabidopsis thaliana
  misc_feature (1)..(1022): Ceres Promoter PT0633
cccgatcggccttaatctgagtcctaaaaactgttatacttaacagttaacgcatgatttgatggaggagccatagatgcaattcaatcaaactgaaatttctgcaagaatctcaaacacggagatctcaaagtttgaaagaaaatttatttcttcgactcaaaacaaacttacgaaatttaggtagaacttatatacattatattgtaattttttgtaacaaaatgtttttattattattatagaattttactggttaaattaaaaatgaatagaaaaggtgaattaagaggagagaggaggtaaacattttcttctattttttcatattttcaggataaattattgtaaaagtttacaagatttccatttgactagtgtaaatgaggaatattctctagtaagatcattatttcatctacttcttttatcttctaccagtagaggaataaacaatatttagctcctttgtaaatacaaattaattttcgttcttgacatcattcaattttaattttacgtataaaataaaagatcatacctattagaacgattaaggagaaatacaattcgaatgagaaggatgtgccgtttgttataataaacagccacacgacgtaaacgtaaaatgaccacatgatgggccaatagacatggaccgactactaataatagtaagttacattttaggatggaataaatatcataccgacatcagtttgaaagaaaagggaaaaaaagaaaaaataaataaaagatatactaccgacatgagttccaaaaagcaaaaaaaaagatcaagccgacacagacacgcgtagagagcaaaatgactttgacgtcacaccacgaaaacagacgcttcatacgtgtccctttatctctctcagtctctctataaacttagtgagaccctcctctgttttactcacaaatatgcaaactagaaaacaatcatcaggaataaagggtttgattacttctattggaaagaaaaaaatctttggaaaaggcctgcaggg

SEQ ID NO: 8 - DNA, 1000 bp, Arabidopsis thaliana
  misc_feature (1)..(1000): Ceres Promoter PT0650
catacttaattctaaaaaaacaacacttatagtttataagcagctcttatgataaaaatctttctgagttatagctctgttaaacttgtattcaccccaaaaacggatgtttcatttcttattttttacttggagtattttattgtaatttgtaaaaaaaaatgtaaagtgggggatatcatgaaaaacaacgtcactttgtttggtcacaatatacatttgataaaataatggtcgtcgcgtgatttagttgatttttgttttatcaaccacgtgtttcacttgatgagtagtttatatagttaacatgattcggccacttcagatttgggtttgcccacatatgacataccgacatagaaggttaaatccacgtgggaaatgccaatattcaatgtttggttttcaaaagagaatcatttctttatatgatctcaaaagtatggaattgaaatgactaatgagcacatgcaattggtgctatcttaaaaaccgaacgtctttgaatttaatttgtttttcaccaaaggtacctaatgaaaccctttcattaaaaaataaaggtaacaaacaaaattttgtattggaaaaaacattttttggaatatataatttggtaatagaattatgagcaaaaaagaaaaagaaaagaaagaataatgagcataataaagcctttacagtattactaattgggccgagcagttttgggctcttgatcatgtctagtaatcttaaacagacgataaagttaactgcaatttagttggttcaggtgagctaccaaatccaaaaatacgcagattaggttcaccgtaccggaacaaaccggatttatcaaaatccttaagttatacgaaatcacgcttttccttcgatttctccgctcttctccactcttcttctctgttctatcgcagacatttttgtttatatgcatacataataataatacactcttgtcaggatttttgattctctctttggttttctcggaaaa

SEQ ID NO: 9 - DNA, 998 bp, Arabidopsis thaliana
  misc_feature (1)..(998): Ceres Promoter PT0660
caagtcaagttccaatattctaaggagaaataatagtatactaaacatacattagagaggttaaacttctttttggatttaagtgtgtatgcataggctatttattcttaagtataactattaactgtagctagatttatacaagaaatacataaaactttatgcatgtgaggtagccatgaatatacgtacatgttgcaatcgattatacatgttgtatttggatttctctatacatgttttaacttgtcattctctaagtatatacataccattaatactgtgggcatgagtttatgataagacttttcttttggagaccagttttgttttcctttccacctatatttgtctataggcttcacggtacactagtttacaagtgtttttatatgttctaaataaaattgagattttccggaacggtatgatctgtttgcaaataaggacgtatatataacagtatcaaatatatttgttgttataaggcaataatatattttctgagatattgcgtgttacaaaaaagaaatatttgttaagaaaaaaaaagatggtcgaaaaaggggagtaggtgggggcggtcggcttttgattagtaataaaagaaaccacacgagtgacctaccgattcgactcaacgagtctaccgagctaacacagattcaactcgctcgagcttcgttttatgacaagttggtttttttttttttttttaattttttcatcttcttgggtttggttgggtcactcttcaggtcaggtgtgtaaaaaagaaagaaagaaaagagagattgttgtgttgtaacccctttgactaaaatctaatgaacttttttaacacaacaaaactccttcagatctgaaagggttcttcttctctcttagtctcttcgtccttttattctccgtcgtcgtttcatgatctgactctctggtcttctcttcttcttcttcttcttctattttttcttacttcgtcactgttgtgtctgaac

SEQ ID NO: 10 - DNA, 1000 bp, Arabidopsis thaliana
  misc_feature (1)..(1000): Ceres Promoter PT0665
aaaaaggatgggtaatgggacctattttccccaacatcccacatgcacacttccctctccattctctcacatttatttctttcattctaatttatccattccgtgtgtaacatattcactaataatctcatctcactaactcattcattgattgtgatatgtttatctagaattagtgttttaacactgtgtctacatatgatttccttttcattgtatgtgaacatgttaactcactaatcattttgtattttcgagttaacatgagtctccacttcggtagactaaagtaaagataggtttgagtataataaagtttaaaatttgctttaaaatcaatatttataaataagtttttatcataagtgatttttgtatgttatattggaccttgtataaacagactacagaagaaaattatttatgagaacttgtaatgttagagtggacctcgtataaactaattatgtgggcttttaccataaactatttatgaaaattattatggcccacaccactataactaaagcccacatatttagcagcccagtttcattgtaagagacatgttcgctctggaactagaattttctggtttttgggtatttgttttcttatgtgtagagaaatgatggtaacgattaaatgttgtgtattacaatttacaatggtaagacgattaatatatttacacacaattttgttgttgctgtaacacgttagtgtgtgtgatgatagaatttcataaagctttaactacgaggggcaaaatgttaattctaaatagttgacagcagaaaaagatatgtatacataatataaggattaaaacgtaaataataataaataaggcgagttaaattaaaaccctgttaaaaccctagcttgaaacacatgtataaaaacacttgcgagcgcagcttcatcgccatcgccattctctctctcatcaaaagcttttctccttgattttcgcattctttagagtcttaacgcaaag

SEQ ID NO: 11 - DNA, 999 bp, Arabidopsis thaliana
  misc_feature (1)..(999): Ceres Promoter PT0672
cagccgtaaatcctccataaatttattttgcaagttttgctcattatataatgagcggaatttatgatataatcgtttgtaataatgttatgttttgatcaaaatttgaaattaaaagtaggtgagaacttgttatacagtgtagataaggtggatcttgaatataaaaataaaatttataagatgtatttaaagcagaaaagcataaaactttagataaaataatgtaaaaatgtgttagcatcaatgttgggatattggccgacccgaacttaatcaatgtcggaagccattacttctctcccaaaagacctttttccttcggagaactaggaacttcctcactacctttcgcttaacgtgaaagccataaatttcatatattcataaaaatcagaaaatctaaaactgtttagtatcacctgtttttggtatagactattggttttgtgttacttcctaaactatatgatttcgtacttcattggatcttatagagatgaatattcgtaaaaagataagttatctggtgaaacgttacttcagtcatgttgggtctagatttacatactactatgaaacattttaagataataattatcctagccaactatatgttctatattatgggccaagaagatatagaactaaaagttcagaatttaacgatataaattactagtatattctaatacttgaatgattactgttttagttgtttagaataaatagtagcgtgttggttaagataccatctatccacatctatatttgtgtgggttacataaaatgtacataatattatatacatatatatgtatatttttgataaagccatatattactccttgacctctgcccccatttccttttactataaataggaatactcatgatcctctaattcagcaatcaacaccaacgaacacaaccttttccaaagccaataataaaagaacaaaagcttttagtttcatcaaagacgaagctgccttagaa

SEQ ID NO: 12 - DNA, 1000 bp, Arabidopsis thaliana
  misc_feature (1)..(1000): Ceres Promoter PT0676
aagatagtacagtttcagtgttttgagaaaaaaagctgaactaaaactaaaatgtttaaggacacaatatttagtttcaattagataattcaacagtttgaacaattttttttttttttttttgaagtcatttatttatacaatgttttaaaacgcattaagcatttaggcagccgacaaacgcctattgtctaactgtaaataggcgcttccacttaggttcatattgcatatttactatatgtgtatagtgacaaaaaccaatatttctcttattttggatgaaggtatagtagttgttaaatgttcaatataattaagcattaatgacaaataaaataaaattaatttagttgataaaaagataatcttataaaaagatcgatgaatagatataatggtttactgaattctatagctcttaccttgcacgactatgtcccaaggagaggaagtaccttaactataattctgaacataattttgtctatcttggtgagtattatatgacctaaaccctttaataagaaaaagtataatactggcgtaacgtaataaattaacacaatcataagttgttgacaagcaaaaaaacatacataatttgtttaatgagatatattagttatagttcttatgtcaaagtacaattatgcctaccaaaattaattaatgatttcaacaggaagtctgagatgatgggccgacgtgtagttacgtttcttgaattgtgagagatggtatttattatactgaagaaaacattatttactaaataaattttcatttcacatcttctgtaatcaatgcgggtagatgaagaagttgttaatacgatggccaaccatatggatctcttttttggcgtttctatatatagtaacctcgactccaaaggcattacgtgactcaataaaatcaagtcttttgtttccttttatccaaaaaaaaaaaaaagtcttgtgtttctcttaggttggttgagaatcatttcatttca

SEQ ID NO: 13 - DNA, 998 bp, Arabidopsis thaliana
  misc_feature (1)..(998): Ceres Promoter PT0678
aattaaatgaaaccgcccctaaattaggagggatttgggtaagtggtaacacattcactggaaacatgtgaagaaaggaggatgtcaagtagctgaaaactcagtatagtaaccaacggcttctcaccaacctttcattaataatttggtcatccctatatttttattcaacattttgtttttcaatagcttagagcaccttaatacctttcagtgtttttttataaaaaaaacaaaaattgggattaatcatcaatccccaaatgtaacgtttacttagattatgttcatttttctatacacacaaatcatattcttttgttttaatcttcgaaaaacgagaggacattaaatacccctaaaaaaggaggggacattactaccaacgtacattaacatgtttgatagcaaacgatttattttgttcgttttgaaaaggggaaagtaatgtgtaaattatgtaaagattaataaacttttatggtatagtaacattttcgaataataagagagggaaaacactcgccattgtcggcaatttagaaccaatattagaagggtttttttagagaaaaaggacttaaaagtttagagaccttaacaacaacttatttagaaatagacatgcttaagttgacaacagcgagtttattttctatatcgaagaaaaatacgaactttttcttaattagatttcgaatgcatgcactatcgagaatcgaccgtcacaagaaaaaactaatatacatactgtacatatctatattcaatattggtggggatgggtttaatgtgtatttataattcatggataaattcacacaataaggtccatgaaactagaaggtaccaaaaataagcattaatgactctttgccacttatatatatgattctctcatagtaccattttattctcccaaacctatcttcttcttcctctcttgtctctctcgctctctctcttctacattgtttcttgaggtcaatctattaaaa

SEQ ID NO: 14 - DNA, 1000 bp, Arabidopsis thaliana
  misc_feature (1)..(1000): Ceres Promoter PT0683
gattgaatgatgagtgtgcacccttgtattactaataaaaaatttagcaacagttataagctaacgtcatccatgagtcattcattagattcactatttgcgttctcaaaaatcgaattgttaaaatttgagaagctctaatatacgagtcaatgagatgtggcaaaagcatgtccttgaccataaaatttcgaggggtcaactcattagataaggacaagaatcaaccaattgaaggcgtcttctataacaagtttctttattactaatattaaagtccaatggggtgagggggagaagaacttaaataaaaggaaataattggtaagtgaataaaatctaaatacgatactagatgattgatttgtgctagtgcatggtattagatcagatatgtgttactattcgaattcaaattggcatattccatgttgttgataagaaaattgtagaagtgtaaaagctgagttactatattcaaactagtggtttacataaagtgagacaacaactgtttcacaaaaatgactataaaatagtaagtagtattaggtcaattgattttaaaattttaatcaaattcaaatttgtgatataatcaaatttgtttatagaaaatgttaagaaatcaattttggcagaactaattcagtgagaaacaatcatttacaaaaacaattttaacattatttaacagtaagatttgacatttaacccgttcgtgtgaacccatcatatctaacatggctctacccatgacgcctccatgccatggacaattttgacagatcagaagttctgaacgtggacgaggtaagaacaccatgatgatacgattggagttagttatgtcgccaccgacatcactgccaatctcattaataaaagtggtactaaatctctaatctctattaactataaatataacaaagaaccaaaagaaagtttcttatctctcttatctttcataatttccaagaaacacaaaccttttctacta

SEQ ID NO: 15 - DNA, 1000 bp, Arabidopsis thaliana
  misc_feature (1)..(1000): Ceres Promoter PT0688
acgttcagaggcatcgcttttgtacaaattgaagcgggtttgttcaatatttaaaataacacaggaaacattcaaatgtattattgatgttgcttaggtttgtgaaatgatatgaaccatatcgtatatattactagatttttcttatatgttttaagggtagtggggctgacctatcattctgtttggcattaccaatcagactatcagagtattcaccattcaggattccataactagaaaaagaaggggtttacattttctcatactgtataattttctactatcagagattttatcgattacattaatctcatagtgattattctgatttataaaaaagttgacaaaataattaaaaccagtattttataacaagattgtctctctcccatggccattattttgacctctgacttatttaaatcttaattaacagcataatactgtattaagcgtatttaaatgaaacaaaataaaagaaaaaaagaacaaaacgaaagagtggaccacatgcgtgtcaagaaaggccggtcgttaccgttaaggtgtgtcgaactgtgattgggccacgttaacggcgtatccaaaagaaagaaagggcacgtgtatagatctaggaaaaaagaaagaatggacggtttagattgtatctaggtaccaggaaatggaacgtcacaccaaacggtacgtgtcggatcctgcccgttgatgctgacggtcagcaacttccccttattcatgcccccctgcccgttaattacgtgtaacccttccatgcgaaaatcaaacccttttttttttttgcgttcttcttcaacttttctttttaaatcaaaccttttctttttaaaatcacattgcatttcctaacgctcaacaaaatctctctctactaatatctctctctctctctctctattgttgaagaagactcataatcggagattgtttgtttttggtttgctctgtaaattggagaagttttgttagagatcaa

SEQ ID NO: 16 - DNA, 1000 bp, Arabidopsis thaliana
  misc_feature (1)..(1000): Ceres Promoter PT0695
aacattttctttaacttactcttaaattttaatagtaagttgatgcatgttatgttgatccgtcttgatcacaaatattgttttatggacgaattctttgacagtaaatggctatagtgactcagcttggagcatcccgatatgaaaacaaagtgcagtattgtgtcgtggtcatcactaacgcactttcctagaactatcgcgcgtgtttgacctatgcaacacaccagatgtcatgaacgtatacttaaatagaaacaatgatatagacaattggctatattctgtcatggaacgcaaaccggataacatgtctattagattcatcggacttgatcatggttatgtcttaatagacgaattctttgttaacgattggttaaaacggctcacgttagagcatcctactatgacttcaaaattgataaatattacatggaaatcactttaattttagttagaaggtagttaatttagatattcttatttaataaattaaaaaatagaagaaaaaaagatgagaagagtttttgtttataaaataagaaatatcttttattgtaattttaaaattaaacaaatttaatttatattaaaattatctttgttttattgttaaggcaataattatttttttggtgggaattgttaaaacaataattagtatactgttaagtggtcctttaataataagataacgtgatttaaaaaagaacgagacaggctaatatagtagagaggaaaaaatacaatttaggcccaataaagcccaatatagagttgtgctcaaacacaggtcttcgccagatttcctatgacgccgtgtgtcaatcatgacgccaagtgtcattcaagaccgtcacgtggcgttgtttctacacataggcgatccatacaaatcagtaacaaacacgaaaagagcattcatatgtacgaaagtagaaaagaagagactctttgtgataaaactaagtaagaaatagcataaaagtaaaaggga

SEQ ID NO: 17 - DNA, 1000 bp, Arabidopsis thaliana
  misc_feature (1)..(1000): Ceres Promoter PT0708
gtttccaaaactagtattctttatttgctctattcattatatttttatatttgtaacgtcccgaccgtctttattaggtttcgacaatcacttctcggaaggtcgtccatcctgaaattactctatcctaaacatgtttaactataaaattctctcgaaacttttgtaacgtatataaccacataaattctcttaaacttatttgcatacaccattatatttctgaaatcgatatgttacaatattatttaatatttagattacttttactgaatcgaattaaatatcaaatcgaaacaaatctaatctaccaaaaataattttgttataaacatttcttgcctagttctacctcatatacattttagttaaagaaagaaatcacaacaattcccataattcaataattaaatccacaaaatcttggagtaagtaagagaaataaaaagatagtatcttaacataaacaattcaaagatgctctctcacacaattcacacacacttacaaaacaaaagacagaaacaatgttttcattcaaatcaaaagaagttataacactagtacaaaaaaagctcaaattctaatagtaactctttttatttcccaattacccaaagattctctctcacttcacaaaactagctttgagagtcgtgttccacaaaatccattaaagctgaaacggttttgctcaccattcaaacaaatacaaaattgcaaaaccccaaattataacaaaataatataaaaattaaaccgctaaaaagagtgaaccaacaaaaatcgccgaatgtgtgtgtaatgagaaaaccgacccatcatcccaatcatctcttcccgtgtcactctcttcctctcccacgtttcttctctcttccctttatgggttttaacttctccttcttcttcttcttcaatcttcagttttcaaattcaacaacaattcacattttgatttcttcatcatctctctctctctcgcttctctctcaaatcg

SEQ ID NO: 18 - DNA, 1000 bp, Arabidopsis thaliana
  misc_feature (1)..(1000): Ceres Promoter PT0710
tagtgcgcgtggggagagggaatggtgaaaccttagtggttaagttatgaggaaaatgataaaaggataaaacaatcaaatgcagcttgaaacggccataacataaagtaccttatggtggtgcgaatatttttgtgtttctttcactcttttattgctgaaagctacgacacttgtcttaatatattgtttccgcaagtcacatgatctactttttatttaacgtctagaaacgccgagatatatgatgattagtatatcacgtctatgcaaattgttagttcgtgtttggccaaaagatatcgagacatgtctgaagaaccgagtctggttttgagatatttcttcaagcattactatacaatagaaaaaggagacacgcgaatatgataatagcaaaaggcataaaaaggcgaaaattaaagaaaaacgtaaagtgatttggcctcaatcaacgggaacgtatcttaattttagaggttcttcttttacttttgagacgagagagtttgcgtctttgcgagctgctttggttgactaaacattatcatattgaaaaccaaaatacaacggaggaatatttgtcacagtttcactttcacattgtttccttaacgtttaatcaaccttgttcaaaatttctatagttgtaatcatcattgtttacaaaattttcgttcaaagatgattttaaataaaattgtgaaagaaaaccttttctgaaataaggattggatgatagtgttaaaagaaaaatatgaactgaggcaaaaagaggagtggtccccggaagattgtgaaatgtgtcatctaaaccagccagacgtagtcacgtgttctctctagctttatgaacttccttagccagcaccatcattgtgattgtagtatatatgtaaccctaccttcatctctcccattttccattctccatatagactcctttacaatatacaaaacctatccaaaagcgaagaagccaagcaaacatattataaaa

SEQ ID NO: 19 - DNA, 1002 bp, Arabidopsis thaliana
  misc_feature (1)..(1002): Ceres Promoter PT0723
gtcatatcttatcaacacgtcaacgatcaaaacctttagcctattaaattcaacggcttagatcaaaacgaaactaggtgggtcccacttttaatatcgtggctgcataacatttcctcgataactgaagccgttgtggtctttctcagaatctggtgcttaaacactctggtgagttctagtacttctgctatgatcgatctcattaccatttcttaaatttctctccctaaatattccgagttcttgatttttgataacttcaggttttctctttttgataaatctggtctttccatttttttttttttgtggttaatttagtttcctatgttcttcgattgtattatgcatgatctgtgtttggattctgttagattatgttattggtgaatatgtatgtgtttttgcatgtctggttttggtcttaaaaatgttcaaatctgatgatttgattgaagcttttttagtgttggtttgattcttctcaaaactactgttaatttactatcatgttttccaactttgattcatgatgacacttttgttctgctttgttataaaattttggttggtttgattttgtaattatagtgtaattttgttaggaatgaacatgttttaatactctgttttrcgatttgtcacacattcgaattattaatcgataatttaactgaaaattcatggttctagatcttgttgtcatcagattatttgtttcgataattcatcaaatatgtagtccttttgctgatttgcgactgtttcattttttctcaaaattgttttttgttaagtttatctaacagttatcgttgtcaaaagtctctttcattttgcaaaatcttctttttttttttgtttgtaactttgttttttaagctacacatttagtctgtaaaatagcatcgaggaacagttgtcttagtagacttgcatgttcttgtaacttctatttgtttcagtttgttgatgactgctttgattttgtaggtcaaa

SEQ ID NO: 20 - DNA, 1001 bp, Arabidopsis thaliana
  misc_feature (1)..(1001): Ceres Promoter PT0740
tgtggccactaaagatttacccttaaccgggcccatataagcccacgtcaagtggcgcttatacgctctccgtaagagagccaacatttggtatgtaatgttgcaaattattcttcaagacaataaattcaaatataattcaatattgtccaaatatagtgatgtacttcagttgtgcacatagaaactccactaaaccaacttttagatagatgcattcacaaattttcaacaatgtcgcgaaagtctaatccatcaccagattctaacattttaattattatatttaactatacatactctaatcagcatgagtcaaacgtgtacaatagcccaagcatataataagaccaaagtcaaactcaaataaatgtctccaaactcaaaacttgaaaaagacctaattattacatggtagatatgactttgtcgacaagtaaaccaactaatcctcgaagctaccttctcttcccagttattatgtgtgatcgatttataaatctcttcttctaataacacctatatttttcttatgatgtgaataaatataaaacttttaactttaaaacatatttatccgaaatattgcacttagatttcaaatagataaataatagtactatctaactgatattgaaaagacctaacacggaaaacagttttataaaaaatcccaaatgtgggtaattatcttgatttcttgggggaaacagaaaatggattaagattaatcggagtcgtgtcaagcagctcgttaataactgtagcaagttgactgagtaagcatcaacgtgtcatctccgtaaagcccattatttctagtctcgccgcgtcttctcttccacgtagcacttcactttttctctccttttgtttcctttggaacacaaacgtttctatttataggaataattacgtcgtccgtatctgtgtcggaacatagatccaaattaaaagcgacttacttaattacatatcgttcgtgtttttttcttcaaaaa

SEQ ID NO: 21 - DNA, 1024 bp, Arabidopsis thaliana
  misc_feature (1)..(1024): Ceres Promoter PT0743
tcgattggcccgatcggccccaaaatcaagctgagccgcttcaaacttcagcttttgaaatcacccccaaactcatgtcctcttatcattataactaaaggatctttcattttatttaactcatcgtcttgcactacccaacccaaaggttccaactatacccgaagctttctaaaggtccaaagactttttttttcgagccagactattcaagccaagaaaagccaaaccccacaagccagtacttttcaattccatattataaacttatctgtcttgttttagtcccactaaaaacaacagaatttaatttaggttgagctaaaacccttgacaaaagtgtatagtcgtcgattcagtagcacactcatcactcatcagatttgatagttgacctaaagtatgactactccatttcaactaacaaatgaaaataaaagagacctaagggttagaggattgaaactatactctcaagtcttttatcactaggctactaccagctagttaacttgatggatttaagcaagaaaacgtagaatttatattcgagcagattgtttagctaaaaaagcttgggtttgaaattgccttttctcccatataagcacgtcggttcctaaataactctttctagcggagagtgtctttccaataatttaataaaaatggtgtttgtatatcaaaaaaaaaagaaaaaagaaactgatcgagatagaacgtttgcagttttataaacaatttaaaaaacaaaaaaaattaaactcaatgtattttttattaattcacaaacaataataaatcataggatcgaatatttacacggtatcaaaacctactcgccgctactatataaaaattgaagtcaaatatcaaccgcaattattaaaccagcaagacaataattcataaacttaatataaacataaataaattaatgttacacaacgatatatggtgagggttattactatcttcttcctctcaaaacacatctcctaaccttaagctttagacggcctgc

SEQ ID NO: 22 - DNA, 1000 bp, Arabidopsis thaliana
  misc_feature (1)..(1000): Ceres Promoter PT0758
agctagccacatcagtgaccaaaaaagataattaacaaaccaaataaaataacaaattttgatcatttggaataaaatttataaaaggaacgaaagcgccttctcacgggtcccatccattgaaatatattctctctttttgctctatataataataacgcgtactaatttgtagtatatattattacaaagtcgatatttgattgttttgtgaacgttgatatattaattttcttggatgatgacaaaaaaagtcatagaaagtaacgtgtgaacatagcattaacaaaatacaaacataatatataaccaaatatatgaaaataggataaaatctcattgaatagatcttcttctattcaaatatataaatatttgtttgtctataaaattaacagagcattcacattatctaaaataatagtaaaatcaaaataaaactaaataaaaataactctggttttataacgattgattttaaatattagtttttgttgtaaagagatcattatatatgtctgtaatatttttatactgagttacatgatatttagttattatagcgtaattaactaagataagaaattaactaaagtgatattctgattattattatttttgttaggacacgtacgtggaaaaactaaacactataggttacaaaacggtataataaactcaccattactggaaaatgtttgcatttgactcaataagtaacttattataagttactgatataatgcatagttttgaaattcttaaataaattattttggtttcgcatgaaaatatgaaaggagagaaatttattattgtcacttatatatatatacatcgtaatcattttttcgtgaataattctctctcccattccattatttctcagtatctctctttctttcccttactttattgttgcttttaaaccttcaatttgctcataaaccaaatatataatatcaaaacaaacaaacaaaaaatcagaattcccctaata

SEQ ID NO: 23 - DNA, 921 bp, Arabidopsis thaliana
  misc_feature (1)..(921): Ceres Promoter PT0829
aaagttttgaattattgggaatcaatttcgaagttttgtaattctttgggggctaataggatattttattttcttggtttcgtctattgttgtttttctatttatggttgggcttttagaactctggacaggcccatgtcatatgttttcccttctccttatatttttcatttttcattttgttaaattaatgcataatatccaaaaacaatttaaatttttgaaggaaccctttagttacggctccgaagctttcacaagtgagaatgtgagatcaaagaaggcaaatggaggattttaaaagttaaaatcatcttttatctgcaaaagttgacaatttttttgtatcaaatctaaatcatcaaactctcttaaactacaagagcataacaacctctatgtaatccatgaaataatctgcttgaaggacataacataaatcattatggctagagtgactaacttcaatcaaatcctcttaactctagctcccttacaatggtatcgtaaaacattatgcattagggattgttgtcctaggaaaataaaataaaaatccccacagaccaactaccattttaacttaaaaataagcttcgtccgcgacgaattgttttccatcctaaaaatagaatggtgtaatctgctaatggtttagttccattaacttgcaagttctattgaaagcctaaatgtcaataaagatattaaaattcggagtcaaaagacaaatgaatcaaaagcaacaagacaagtcagctccattcttcactacccatcttttacaataaatcatctctcttttcacaaatttcaaactactctcattgccctttagctttgttatagagccaacactacagagagactcacacacttgtttcaataattaaatctgaatttggctcttcttataaacta

SEQ ID NO: 24 - DNA, 763 bp, Arabidopsis thaliana
  misc_feature (1)..(763): Ceres Promoter PT0837
aactacaagggagacataatatcaccatctggttcctgttatcatctgaagatttcttgttttaccttccagtgataaaatgatccttataatacatatagatatattaaattgctgtattttaagattatagatatataaggtacatgagagtgtttatttaaaaaaattcacttggaattcatgttttgtgatacgttagattggaatccatttgggaaaagaagaatcatctgttcttatgtctcaaattttgacttcattcacttttcttcttgtcttttaagaaagcttccacaatctaactgttcgatgtgaaaactgagattcgagtaagaaaatgtgaactgtgttatactgttttttaattagataatttagattgcactcagataaattaataacattcctcgaatacttttatgtgattggatatattaggtatatctgccaaccaaccaataaactgctatgtttaaacaaattaaataaattagtatatgtttactcaagaataaagaagatagaaaagaaaattctatatgagctaaatttgctggaggaggcatcggacgtgggtaccagacctttccaagcacacgagtagtgcttagccatgtcatgctaacatacaccatttggttcatacaaaatccaaatcaaaatctatttttaaaatcttttgcacacgtctttgaaaaacacctctcatactatagctacggaagcttcaatttcaaggtttgtctaaaagctaacgatt

SEQ ID NO: 25 - DNA, 751 bp, Arabidopsis thaliana
  misc_feature (1)..(751): Ceres Promoter PT0838
atactggtatgcttaaggttgaagccaagatctctgtcttacccaagtaaccactttctattagaagggatcaacactaagaatatggagatttaagcctaagggctaaggcggttctcaacaatacatgatgtgaatacaatcacagacgatttactgaggtttgttgataagatcttgatcagtctctgcatcatctgttcaacaatctcaatctttgactgtttgctttcggagccataaacagaggaatcccttattccctgttataggagcaatacaccaagtattatttccatggctgaaattctcttatggaaacctaattgttccattgaagctgtaaaatcgaatctggtgaatattctcgagcaaagccgcatgctaattatgtcaattcagaagagtttgattaggagactcgaagcgagtttgatgatctttcttgatgttcaactccgattgtaagggtataattgacttttcatgtattacggctccaccacctgacactaaggcactctttgtccatctcgttggtatcatcggattcggatggtaaaaataaaaagagcagaggaaacttgttactcatgcaagcttctcaggtgccacgtcactccattacgtgtcatcttcacacaccatctcgctcaaaaccgatctcatttttcaaaccttaaaggcagaagcaactgattaagttaacactcttgagaagctctcgattaagcttgaacttggaggatca

SEQ ID NO: 26 - DNA, 669 bp, Arabidopsis thaliana
  misc_feature (1)..(669): Ceres Promoter PT0848
tctctttaaatcagttaactaaccgtttatatatttacgataaggtttgaagagattattgataaaataatacatttcataatcccgcgttcaaccgtttaaagtaacatttaagttgactatatctaattttttttccattaaatatggagctggtaaactttatcaacttctaaaaagtgtaacaacaaaaattaggtcaatcacaattctgttttttttattattttggattgacttccaattgcaaatagtcttagtgatcaccattatcatacatatatacatcaagtaggtttcatcatgatataccacaaagtatttgacaagccatatggttttggatcaaaaagtcggtccaaaattaatgttttatgtgcaagaaccgacccattgtacacacgtgttaacatcttcaagactttcatctctatttttcttttggtcattaagatacccattgatccgaatctgttacattcccacctacttttttaatttttactatccactccaaattaaacacaaccgatgattttaataattggaagcttttaaaaatatttcaaaacaagcctctttgtgtttgtctatatatatacacgtaataagaaggtgaatgaatctcacagcttacttgttctaaggcttccaataacgaaaacagta

SEQ ID NO: 27 - DNA, 702 bp, Arabidopsis thaliana
  misc_feature (1)..(702): Ceres Promoter PT0863
cgggaaacgacaatctgatctctagtccagtcgattggcccgatcggccgattataaacttacatgagacaagtataaataattattataaacttattaagtttaagatcaaggcttttgtgcaatgtatcaatgaatgttagatgtgatatgatgaaagcaatgttttaaacacatacatagtcattgatcggaatgtgtgttattagaaatgcatgcctaagccgatagggttatctatgtttggtcttggacattatagccaaatttcgaatctaattcttccaatatatatttttttttttttgcttagggccactactagtattgcttatcaattttaagagctcatgaaaatgcaacaatatagtagttgcaaatccttgtttcaagagaaatcaaagggccacttgtgaattgaataataataatatttgcaaataacctttcactaaaccataccaacaaaaccacacagatttggcaaagacataacctttgggagacgtgaaaaggctcaaaatttgacaattgtccttacaaattcgctcattagtgcaattgtgagatttgtttgcatccaaatccaattcataactcacactcgtctcaaattcgaaaaggcctgcagggccagtgcactgggatccaacaatgtcctccgactcgtccaagatcaagaggaagcggaaccgcaccgcg

SEQ ID NO: 28 - DNA, 435 bp, Arabidopsis thaliana
  misc_feature (1)..(435): Ceres Promoter PT0879
ttctaggaagactggtcaagctaagctgtttctgttttttgtttttgtactttactttttgtttgctagtgggaactgggtttattgggccttgaagttgataaaagatgaataaaagacatatcgcctaaagcccatatgagaagcagaagacaaaaacctccaactttgggcataaattttgattatagttaaaagtccagacccaatttggcacctggcttagttacgattctaaggcatgacacctgcctaatatgtttattacagaaaataaagagaatcagctaggtgtcccttattgaacacattaacaaactccaacgacactacgtgtcttcgtgactcttactatatccaaaaacctatagctaaagctgaattttccatgattagtatagtcccaaccaaaaaaatactgaagaaggcataagc

SEQ ID NO: 29 - DNA, 397 bp, Arabidopsis thaliana
  misc_feature (1)..(397): Ceres Promoter PT0886
agtgtatttgaaaacgacattgaagaattaatatatttttttttaattttagttttttatagtacaaatattaaaacaaacaatcctaccatatcataacatttgtaaataacattttaagttttgttttgagttttaattaattttctatgacaaaaaaatgaagtcaatagactaagtgaatcatatagtataaataaacacaatttaaatagtttcaaataaatttagaaagaataaaacaaatagaaatcagaaggtgtctgtttcctcctcgcaacatacgatcaaagagaaacaacttgaccctttacattgctcaagagctcatctcttccctctacaaaaatggccgcacgtctccaaccttctcccaactccttcttccgccatcatc

SEQ ID NO: 30 - DNA, 1024 bp, Arabidopsis thaliana
  misc_feature (1)..(1024): Ceres Promoter YP0007
agcagaacaactatatttattgtgtcacataaatctgagatcatttataaccaccaaagaacctatacacagtaaatgacaaatgtatctccctctatctctattgcccatatgtagatgctaaagtaagatttctcttttttttaatgtacttttttttgtataaagtatattccataagaaaaaggaaaagcttgtttatggatcaattgaccccaaaaaaagtttttagatcaaagcccaatataaaaaaaaaacacagtagtgacacaaaggaacttaaataaaccatgaattgatctataaacagtagagatcgataaggcgaacattttccatgtgaagtgtcttctttcatctataatatttttgacatccaataatttcctctataatatcattcacataattgatagaaacattatgttagaattgtccacatcatttgagctgtaatatattctgttttaacaaattatatggtagttgcttaatcttatgtccatcttcttctatgcatcgttttcgcgcctagttgtccagtccatttcaactacctacctctaattcttatcttaaaacaacattttttaatttaagtattatgctcaaagactaactagatagaaaaccgttattaaacattaaacgaattaaaagtcttacatggaaaatgtaggtttataaaccacgagttatgattgacaataaaaaaaatgcaaatcatcaatcaaaagagacttgagtgcgactctatatcaaccattgcaattaaaattatctatcacaaaaattttagacagattaagttaatttagtctaaattcactaatttattttctataattagtaattaactatatttatttatttacacattttctgataatttagaaatttgcatgaataacaaatataagattttggaaattagtagcaaatttaattaataattatttttgcctaaatgaaccaaactataaaacctccacatacaccagtcatcaaatttacagagacaaca

SEQ ID NO: 31 - DNA, 1000 bp, Arabidopsis thaliana
  misc_feature (1)..(1000): Ceres Promoter YP0008
ctcgagagatgaagtcttagtaatgtttgaacaaacaataatcacgttttccatcaaattcgagcatttaaagtttatattactacatgccccaagatgataccgtccatctcatccgaaaatatttctgaaattgcgctaagacaacaatgtttgctcaaattcgatcatttaaagtttacaaatctctcatcaatcttacaaacttctcacactaaacagaggtacatattttcttataaagacaaaaggttcgaacagctggcttctcaactcgagttgtttgtcagggcctctcttcactaactacaagttggtacttcaaatattggtggctagcttcacgtgatattgtctacaaattaaacccatgaaaaagctgcattaattgttccaagtgaaccctgaggagtgtcaatagtctttgctttagtgtgatcattaaaccaaatctctaaattcctaatttgtactaacatttggaacgtatttcctactcttctccctgctccaactcccaaaaataagattagttagatttctataactaatatacatgtatactcccaaaaacagtaaaaccatattaataaagctaattttgcatagatttatttcggtaaaccggcggttcaagttggggaaaaaaaagacaaacggtctaaagtcatccaaagacaaaaaaccaaagacaagttgagagagacgagaccaatcacaacattgcttcgtagattgcgtgacatcatccttgacggctactttcatttgtgtcttatttggataaaacgcacgtgtttaattcacgaaccttcatagcaataagaaatttccattactttcatattttcaactttttttattacccattacatgcttaaaatattaattcacaagtctttgtcaaaattcaatattttccaggttcatgaaccctttttatctcaatctactctataatatctccctataaattacaacaaaacctctttatttttca

SEQ ID NO: 32 - DNA, 999 bp, Arabidopsis thaliana
  misc_feature (1)..(999): Ceres Promoter YP0019
gatataagtagaatcattttttgccgccgtttctcgctaacacaccgaaaactgaatcaaatctcctagctcttctacgcaaaatcgagtgcatcgacaatggcggaacgtggtgtcgaacgtggtggagatcgcggcgatttcggacgtggattcggtggtcgcggcggtggaagaggtggtccgagaggtcgtggtcgccgtgcaggtcgtgctccagaggaggagaaatgggtgccagtgactaagcttggtcgtctcgtaaaggaaggtaagatcacaaagattgagcagatctacctccattctctcccagtcaaggagtaccagatcatagatttactcgtcggtccttcattgaaagacgaagtgatgaaaatcatgccggttcaaaaacaaaccagagccggtcagagaacgagattcaaggccttcatcgtcgtcggagatagtaacggtcacgtcggattaggagtcaaatgctccaaggaagttgcgacggcgatcagaggcgcgatcattctcgcgaaattgtctgtggttccgatacgaagaggttattggggtaacaagattggaaaaccacatacggttccgtgtaaggtaaccgggaaatgtggatctgttactgtacgtatggttccagctccgagaggttctggtattgtggcggctagagttcctaagaaggttcttcaattcgctggaattgatgatgtctttacttcttctagaggatccaccaaaactcttggaaacttcgtcaaggtatgtactttcacaatggctgttttggtttgatgaactctgaattaggcagtgaaaaagtaatcattaccagttaagtgaatttatattgaagattaggatttagctgattgtattggtttgagcatgtgagtttgtgtttaagattgcttgaattgaaatgctttaggttgtttgattacgctaaattctgactaatgtaattcaaattgttgttgtttttttttggtc

SEQ ID NO: 33 - DNA, 1024 bp, Arabidopsis thaliana
  misc_feature (1)..(1024): Ceres Promoter YP0028
gtcagtgaagtcgattggtagtacttgaaacacttggttggtttcatgtatttggcctatatataaacaaacatcgtaattatatacggatttttttcggaattttacgccatatctgtaagtatatataacatgcatgtcgttttcaaattcatatgatgaacgatccacgtaagtgctactactcctacaatattgcatgagagagatatgtatttataaattttattttgaagaagaaataagagggaaggttacttgggtggatcgatgtgaaaacaaaagaagaaaaagcgaaacccactaagccattacatgatatcgaccttcttatctttttcctctttattttatttttctcatcttctttttgtcaggacttttttctacttaatgaaacctccaaactatctaactaatacactcccatgtagaataaagaaaattatataagatattgttgatattttgtaactagaaaatatatttgctctgtaatttttcgtaagttaaatcaacattttaaagtagaaacaaatattactgcaaaaagtaggatcattatttttgtccaaaatctcagttagctatagggttgtagtaaaaacaaaacacattcttgatttgccccaaaaaataaagagagagaagaatattgttcaaaagtggtctcttctctctctaattatgttttcactaaacccaattagattcaaacagtctacaaagtccaaaagataaacatgggacaacaattcgatgcaaaaaatcctcttttcatgctctttttttattctctagtcttttaaattactaataaaaactcacaaatccaccaaacccattctctacaactcaccttcatctagatttacccactcccaccgagaaacacaagaaaaaaaatatacatatataaatatacaagacaacacatgatgctgatgcaatatacacaacaaagtattaaatcttagatattgtgggtctccctttcttctattcattttcttattcattaaaa

SEQ ID NO: 34 - DNA, 1024 bp, Arabidopsis thaliana
  misc_feature (1)..(1024): Ceres Promoter YP0039
ccgttcgagtatttgaaaatttcgggtacacccgcctaaataggcggaccttatctagtatatatatacatttgaactatattgtttactttttagttgatttaggctatgtcatgacattgacataaatctacctgttatttatcacgtgtaattcgtgtaaagtgtaaactagaaagttcaaatacgtatttgtttttgttctgttatataggattgtcatagttgtaaatctacaatttattacaacatgaataagtacacaagcaatgtaattggatttaattgctaaactctttacatggtcaatctaaatttgataagaaatacgtcacatattactaagactgatagtttttttgttgtcaccaattatttttgttaaattgacgaaaacaattccaaaaactcaaatgtacaaaatcatacagtctcacaaacatctcatagagaaagatataaatctcccatatgggaacgataacacgaggtcgaaatactattcgtaaaactaaaacgccttagttataaatcgttagttgtaaccgcggtcgagaatacatacagatccacgaaactactactacacatgctgctgaattggaatttggaaaagaccatcttctttaggaagagctcacccaatgagtgacaaaggtgtcggtggcttgttttctacccatatgtatacatcaaatggtagtttcattaacgtttggttttgagaaaagtaagactttggctagtagctaggttcgtatataataaactcttttgagaaagttcatcactggtggaaaatgttaaaccggttttttctcattttttccgccatgttaaccaccggtttaaaaagaccgtaacacattgaaagattaataagggtatatttgtaattacggtttgctggcaatttttaattattattttaattagagaaaatagagaagccctatcaatgtacatggtatatatataaaaggcaaaaccctagaaaacgatactattcgactcagccgtcctt

SEQ ID NO: 35 - DNA, 1024 bp, Arabidopsis thaliana
  misc_feature (1)..(1024): Ceres Promoter YP0050
aatctgatctctagtccagtcgattggtacttgagggaaacatcatatttttaaaccttgtctcagtaagctaacacacaccccttgtgattacttatccatgtttatccacaagaatgcagttggattgagatattttcttctttgttgaaatcaggcctcaaggtgttcatgtggtctgcaaaaaaattcccaaaaataaagatagtgacatctgaaatcgataatggattagacgaagagtttcgtgttattccttggtatgggcgggtttggggacagatattttggcacagacgaggactaggccactgtggtcctgcagcattaggtgtcccttccatgtcctgcattacattttattgatggattcatcaccctatctactacaacggctacacaaactatgaagagttttgtttactaataaatgcccaagtgaggggtcgatcgaacccgggacacgtttttcagtttaccatatagaattatccttggaacccttgatactccatagaacatcaccacctctgttgtcatctcaggaatccaggttcaaacctagtctctctctccctagtgggaggtatatggccactgggccaatgatgacaaaatgcaaaaaaaataaaatacatttgggttcattatctaaaatatctcttgtgtttgtaagttttggttgcacactcgtgtggttgaagtgtgtgtgagaggtactatacaatacactctgcttttgttttgtacctatctctttctcttctccacatatccaagactttggggataaagctgagatcattggttgccatttggttgtgtagaagcaatcacccatttgctttatccgaggttgataaatttcctcgggttctccttctgacacgtatgacaaattctaatagtatattcctcgtagatattacctatatattctcaatagttgcaggtacttaaggctttgtcttggcatcctcgtcctcttcagcaaaactcgtctctcttgcactccaaaaagcaa

SEQ ID NO: 36 - DNA, 999 bp, Arabidopsis thaliana
  misc_feature (1)..(999): Ceres Promoter YP0086
cttatcctttaacaatgaacaggtttttagaggtagcttgatgattcctgcacatgtgatcttggcttcaggcttaattttccaggtaaagcattatgagatactcttatatctcttacatacttttgagataatgcacaagaacttcataactatatgctttagtttctgcatttgacactgccaaattcattaatctctaatatctttgttgttgatctttggtagacatgggtactagaaaaagcaaactacaccaaggtaaaatacttttgtacaaacataaactcgttatcacggaacatcaatggagtgtatatctaacggagtgtagaaacatttgattattgcaggaagctatctcaggatattatcggtttatatggaatctcttctacgcagagtatctgttattccccttcctctagctttcaatttcatggtgaggatatgcagttttctttgtatatcattcttcttcttctttgtagcttggagtcaaaatcggttccttcatgtacatacatcaaggatatgtccttctgaatttttatatcttgcaataaaaatgcttgtaccaattgaaacaccagctttttgagttctatgatcactgacttggttctaaccaaaaaaaaaaaaatgtttaatttacatatctaaaagtaggtttagggaaacctaaacagtaaaatatttgtatattattcgaatttcactcatcataaaaacttaaattgcaccataaaattttgttttactattaatgatgtaatttgtgtaacttaagataaaaataatattccgtaagttaaccggctaaaaccacgtataaaccagggaacctgttaaaccggttctttactggataaagaaatgaaagcccatgtagacagctccattagagcccaaaccctaaatttctcatctatataaaaggagtgacattagggtttttgttcgtcctcttaaagcttctcgttttctctgccgtctctc

SEQ ID NO: 37 - DNA, 1024 bp, Arabidopsis thaliana
  misc_feature (1)..(1024): Ceres Promoter YP0088
tcgattgggattactacttcatctagtaaggttctgaaaacgtttgttgttgataaggaagattcgtctcaggttattactgttgatcttcaaggtttgtgattgtgacgcttatacatgtgctgaaactgtggtgtttatttattgaaaacaaaaaaaaagtctctcttgtagtttcattgtactaaatagaaaacaagaaacgtttttttctttaatcttctacattgataatattggatcaaaggattgtttctgcaagacacaacacaaacatacttatactagtttacttctactaagtactaactacatacccatacacacacttgcacctagactttacttctagacatcattaccctaaggtagaaccaagcttacaagcaagttttaccgacaactcttacattacaactctagtctgtagtctttaacgtagacttactaactagtcattagtggtttaattttttaaattttcatccatatgtttttgttgtagatataaactaaagtcggtcacatttaataattgtcattatgtccgcgtaaaagtcaattcagctattggacatttatgaaatgtaagattttctctctcatttccccgtgcgtgaagacatgcattggtttttctgtaataatcaacaaatccaaaccccttttcgatctttatttggacattgttagagacaaaatttctctatagtctttttcctaatttgataccatgtttttgtttctgcacaaatttactcactggtttaactaactatccacttatttatgattttaccattaggcgtcagctagccctagtcaaatttgtaaacaagccaagctatctacataaatcgagatgtcattaacgttaatcgtcgttaattcgaatttgaaaacatagatagctttagcagtacaatgggcaatggtaagaagaatagcaaaaggcccaatatttggtttgcagaaattaaagccttaaaaaaaagcccacagatatttgtcaaagaaccctaat

SEQ ID NO: 38 - DNA, 1024 bp, Arabidopsis thaliana
  misc_feature (1)..(1024): Ceres Promoter YP0092
aaagattgagttgagagagatggtggagacgcagaacagacaaagggagtttaccatatagtgctctaaagggcaatgagattgcagtgatgtggctatccggggaatcatcgcaggttattccttcccatgagcaacaatcaatggatgggttccaattcagaggagaaacagaagaagaaacgtttccagagaaccacagtagggattctcgatcttgcgagttgcagagagcctctgaaactgcaatagaaaggacactgatgaaaagaacacactgaaggagtatgccaatcatgtgaaaactcagagcttgtattggtcttgtggttgatgaagttctcacaaaacctttggctttgaatctcccctcattagtcatggtgagaacaagaacaagacgagaaacagacaaagaagatgaaaaaacttgttggccagtgttgactaagggggaatagccccagacataacaaaattagacttgtcgtacatctttaatatttttttatctgtttctttgtcctgacgctttcattattcctgtgatcaattttctcataccattggtccatcgttaatcctttcttaatttcattttctacgtaacatgagaggagaccaagtcctatgagaacagttgacgtaacagtggttgttaagttaagttaaaaagaggaagctagtgagagtgaccgttaggtagagaagtgagatctttaaccactcttctttctctctctctctgcttttttcgtcgtctttcacatctactgttcgcaaactctcttatgcttccaataatggtgataccaattgagacttgcaggagaatctcctcttctccacactctatcaactggtcagccatggaatggtcgtttcagtttcaatattcctggattctttttaaggattcctgtttctcttctgttcctggtatattcttaacgacgaaattagtatcggatcctggtaatacattttgaagcttttaagtaccattgcactgggatccaacaat

SEQ ID NO: 39 - DNA, 1020 bp, Arabidopsis thaliana
  misc_feature (1)..(1020): Ceres Promoter YP0096
gaggtcagtgagtcgattggtgcaaaattgaaaaattgaagggtgaaacaaatttaaagataatatctattaaatcctctaattttaaaaatttagcaaaaattgtattttcttatggatctgttagttcacacgtatcttaattagtaccaaatcatatctaatgattagtgataaaactagttagatatctatatgtgtctttaccatttaacttgaatccttcttcttttttttacgtaaacaacttgaatccttcgttaatacataaatttaaagcattttttctttaattctattgatcggtatatatttactataagttttagctcatatgcaatttcaaatgatatgcttttaaattttgtctaggtgtgatagttgtatctttaacataaatcttatagcaaaattatacttgatattctaaatttatctatttgctcttgtgaacctcatattagtctagagaaactttgaaatcctttcaattagttgtatgtccaatacatttttactaacatttattagtctttttaattaagattattgttagaaaaaaaaagattttttaaaaataaataatatgttttagatacaatgtgagttaggcttcttatattttaaaaaataaatttatttcatacttaaaaatagtttggaatttcaatttatttggctgaataccataaaatatgtcaatttgaaccttatacccattgactatttggtgttagaaaccctttaacaaaaaaaaactatttggtgttagatatcaaaataaaaaaagtttaaccattggtttcttatattgaattggatattgttacatgtattaaagtttttttggtttaattttgaaacgttgatagaaactattaagtttaagtttggtagtatatttatttgtggaaaatttaattgccattaaatataacgtcaactttttttggttttttttgagaagttacgttgtgattttgatttcctatataaaagttagattacgtcattttttaa

SEQ ID NO: 40 - DNA, 1000 bp, Arabidopsis thaliana
  misc_feature (1)..(1000): Ceres Promoter YP0097
ttcatctttatatttaagagtttaaaaactgcaacttttgtttttctttcactaagtcttatggccacagttaattaaaagcagatgaaaggtggtccaatggaaaaggagaatgtgattgggctagttgggagagttctgatgtctagtgttgggtacacgtgtccgtcagttacacatagcattaaatcagacggcatgtcattattcaaatctagttcacatagtacgactaatagctgataaattaatgattatacagcatatgaattatgaattcaaaaaaaaaaaaaaattgaaaatgttaaggagatgctatattttacaaaattcatcgcaatgctttctactaatttgctaagtggtcttctccagttagtcttgtcgattccaagcgatattattaaatcttgaagcatcgctcaaagcattatagcttaagataaccaaattgttattaaaaacacctagtgaaatttttaaattaaaacaattttgatatctttgtaatatctaatactactctttctgtgtctaaaaggattaattttcaaaaatttcacacatattaaaaaaaaaaaaaaattactagctaaacaattttcaataatcataaaacaatagtaacttaataatttttttttattttcaaaatagtccttcaagtttacaattcattttagtattataatcaacaaaatttgtattaaaaagttggaaaattaatctttgtggaacaaaaaaatctagaaatcattttttagaattagagagaggtttgataaaaaaaaataaaaaaaaatagagagaggtagtacatactaaacgatgtgatactactattgacaaaatcttaattctcagtttagtagaataaactagaaggaatgaatgaagtaaatgcgaatccaactactaacaaaccctacttagtcatcatattttcccatatgaaatccctatataaacccatcatcatctcccacttttttcatatcca

SEQ ID NO: 41 - DNA, 1004 bp, Arabidopsis thaliana
  misc_feature (1)..(1004): Ceres Promoter YP0101
ttctcgttctctagaatattgctggaccggattaggtcaatattattgggccagattagatattgaattgtcgacgttgcttacgttacgttatatcttgtttaagaattaaacctatcgacttagtcttaattaagaaaacattgccttaaattctctggtctgcgaccgtttttttgaccgttaacccctaattaaagaaacaaaataattatagaaagagcactgaaatgtgattattttaacagtactcttatgagaaaattcgtactttttagttttttttttgtacaaatctctaagaaaaacactactactaattaagaaacgtttcaaacaattttattttcgttggctcataatctttctttctcggtccgggactaaccgttggcaaaaaaaaaaaaaaagttgacaataattattaaagcgtaaatcatacctctcaaataaaaacttgaatttggaaacaaagacaactaaaaaactcgaatttaagagaattcctaaaatcaagtgaagtatcatcacttggtaaaatttcataaccgttggcttctatttctatgtgtgccttggtttgcaggagataatatttcatttccaaccaatgatattcgtacacatagtcaaacaaatgtttgtctttgttattatattgagaaagaaacaagaaagagagagagagatagataagacgaaggaagtgaagcttccaagcgcccaccgttaaaaatctcgtgtgcaagtttcaaatacaagtggccggtggtctccataatttgatcgtcatccaattaaaaaggaagaaaaagcgtgttttatacaagaaaactcattaaaatagcaagtctagaaatatctcaacactaatctaccacgtctattacacacacacacacacacacttgatcttaatttattttcaagattcaagaaaatacccattccattaccacaacttgaccacacgcctatatataaaacataaaagccctttcccc

SEQ ID NO: 42 - DNA, 1000 bp, Arabidopsis thaliana
  misc_feature (1)..(1000): Ceres Promoter YP0102
atttggttgataacgttttcactcgactaattatatacttcagaaggatagtaatagaataccaaaataattaaatgattggttagtgccttagtggagactttttaaccgattctaatagactaatgatgtagctaagcatttatttgggatcatcactgtttgaaaacgtgaaatgtgataaaagttatgaaacgattaaaatataaaataaccgtacaaaacattatgtaccgtttttttctctgttcttttggcgatttggtttagttcgttacactctaaatgttattgcagatatatatataatgatgcatttgcatctgaggaacatataattccggttaacacttccaaatcttatatccgtctaggtagggattttataaatcatttgtgtcatcatgcgttatgcttgtcggctttgaccataacgcagagatatagaactagcttttacttaacttttagatttattatttgatctagagttaagtggagatatatagtgtttttgttagattattggtggatgtgagagtttgtctttagtttcaagttgagaatataaggcaagaggagactctgaggcaatcagaggttttgattggcaaaatatccaaaaggcccaaaccaagtcgaagcccatctcgtacaaaaaaagaaagagatctgtaagaaaaaatattctttgatattcttacaaaaataagtgtaaaacttttattagtcaaaatcttcaatctttaaaaactctcatcactcctacgaaagcgcgtgagagttatgagacattccttaatagcattactcacaagtcacaagttcaaaacgtctgactgaaacagaaacaagcctttgttgaagtcttgaagaagagacattagtactcgtcgtatagccataaaaggtaatatacgaaatttcttcgctaatctcttcaccttcctctacgcgtttcactttcactttataaatccaaatctcccttcgaaaacat

SEQ ID NO: 43 - DNA, 1004 bp, Arabidopsis thaliana
  misc_feature (1)..(1004): Ceres Promoter YP0103
gttttgaagaacaatctggatcgaaatctaacataaggtcatcgtattcaagttacgcagtcaaggacttgacatcatcctactctggtctgaggttaccacttccaaagatgggatttttcgactcggtatgcttcctaagaaattcgttttattgaacctagcaaatatcttgtaatgtaagattcctgagatgatgaagaaaaaacaaacttttgttacagcaggagaacggagagaaagaaaacagagaaccaaatgctcttgaagcaaacagaagaagaagacacaaatccaaacttgagacttcttctacaccagaaaaccgcagcattctgggacaacgcaaaacacgaaagtgaaacgggcaatgatatatatgtcttgggtgcgttacaaggcatcgtttgcaactgttgagttggataagtcaactgtcttcttttcctttggttgtagtagctgccttttttttcctttgttgctttaagaaatagcccgaaaaaaagaatgttctacatttcggagcagaaaactaaccgaatgagtttttggtcggatcatcggatcgatcagatatattttgagttacgaactgttataaaaaaagccataattttgtgttgagtttgcaaaataccttataacttgttatttgagattgcacctccatatatattaattcgtaagagtatttattaagtaagctttagtataaatccttttttcctttaaagtaagttaatgttctactaaataatagtaaagttgaagaaccgctccgtttttacaccatgcacgtgttatctaacaaagaaaatatggtacacctaatggctaatgcaaaggacaacacaatgaaactaacttgactctgtgttatagaaacccatagacatctgcatacatcctagtatttgtataaattggactcaaattcctgaggacaatcatagcaaacaatcacatcatcgcaatatacataaacaaaagaggaagaaaaa

SEQ ID NO: 44 - DNA, 1003 bp, Arabidopsis thaliana
  misc_feature (1)..(1003): Ceres Promoter YP0107
taacaatccttgggaacattgcatccatagatatccggttaagatcgatctttgaactcataaaaactagtagattggttggttggtttccatgtaccagaaggcttaccctattagttgaaagttgaaactttgttccctactcaattcctagttgtgtaaatgtatgtatatgtaatgtgtataaaacgtagtacttaaatgactaggagtggttcttgagaccgatgagagatgggagcagaactaaagatgatgacataattaagaacgaatttgaaaggctcttaggtttgaatcctattcgagaatgtttttgtcaaagatagtggcgattttgaaccaaagaaaacatttaaaaaatcagtatccggttacgttcatgcaaatagaaagtggtctaggatctgattgtaattttagacttaaagagtctcttaagattcaatcctggctgtgtacaaaactacaaataatctattttagactatttgggccttaactaaacttccactccattatttactgaggttagagaatagacttgcgaataaacacattccccgagaaatactcatgatcccataattagtcggagggtatgccaatcagatctaagaacacacattccctcaaattttaatgcacatgtaatcatagtttagcacaattcaaaaataatgtagtattaaagacagaaatttgtagacttttttttggcgttaaaagaagactaagtttatacgtacattttattttaagtggaaaaccgaaattttccatcgaaatatatgaatttagtatatatatttctgcaatgtactattttgctattttggcaactttcagtggactactactttattacaatgtgtatggatgcatgagtttgagtatacacatgtctaaatgcatgctttgtaaaacgtaacggaccacaaaagaggatccatacaaatacatctcatagcttcctccattattttccgacacaaacagagca

SEQ ID NO: 45 - DNA, 1024 bp, Arabidopsis thaliana
  misc_feature (1)..(1024): Ceres Promoter YP0110
gggatgcggttccgcttcctcttgatcttggacgagtcggaggacattgttggatcccagtgcaatggtaatataaaacaagaaaacaagagattttataggacaatcactaaatgacatttaattgattaaacatttattcattaataattgtatgttactaacttcaacatttaataattttgtttaagatacgtttacatcagagactattaatatttttacaggttgtaactttaaactttgtcttgaatcgaacatgactatagattttgggcaaacttaaagataacaacatttccgttttttttcaaattattacaaatcaaactgatatattagacacaacacgattacacgtaatgaaaaaagaaaaagataaaaagataaaagaagggatcgattctgtttggtctggtttagtgagattcaaagttaagctcttcctttcaagacatgccttcttaaaccgggaatgtgaacgtttgtaatgtagtccgtccagttaatgcttccaacatcaaatccaaattctctcttctcgtcctctgacatattctccattaatctctggggtattgctgttatcaaatctgtaaaagaaaccaaaaaaaaaagatgaaaactttgcgggtaccggttttgtctgctctaagaattagaatgttaatgagttctgtcttaccttccaccatagaaagtgtatggctcataaatagtagcaaggtgtttggcttgttcaacagatttcttgcatataaactttagcttctgcatcatcttactatccactgaactcataccactcatcaacccactccgttcttgagcatctctccacaaatgatccgagaaatcatcaacggaattgaaaagtttcatcaaacgcaccataataggatcacctttagagtccatgcatggagatgttttgtagtggttataaagaagctccgctaagtcttcgaaaaccagcgggtttatcgccgaagaagcgatctgatacacgtttatttcaggttcc

SEQ ID NO: 46 - DNA, 1024 bp, Arabidopsis thaliana
  misc_feature (1)..(1024): Ceres Promoter YP0111
cgattggatttagtctatacattatagggcgcaagtttgtggatttaagaattatataaaaacttgaaatatatagtttttatgcattctcctcttgtgtaatacataaaccaaatatgagataggttaatctgtatttcagataatattaaattccaaacaatatttttacttgttataagaaggcaattaatatctctctgttaatggcaagtggtaccaagtagtattaaactattaatgcaatggaagagtactgttggaaattataatcctctatcacacattcaaacagatctcctgaaatcttctcttccaaacttgtacttctctgatccaaatgtaggctccaaaatatagacatttaccatttactaagtccacaactcctttcttgtctccttcaaaaatgactcttgtgtaaccaccatatgactccgacagttcggcattgccatgatgagagcttaaaaattcaccttcctgagcatttcaagtcttcactcccttagcttgacctgaaccaagataaaatgcctttgtcgtcccgtaatatccatcctgctttggacggcatcatagttacattcgatccatcctatttacaatgttattttagtattaaaaacatgacaataaatttgttgttaaacatattcaaatacaatatgattggatttataagtaattgtaatatgaaatgtccttagtaatatgttaaaaaatacatagatacacacacgtactaaaagaggcaacgcgggagatgtcattagaggaagaactaggaagcagagcgttcatgcaaaatgctaccaaaaacgttaatgcaatatctcaactaatcagcacagtccatttcatactgagaatgtaaaaaccaatcagcatcgtccattttttcatctaattatttgttaactcttaattggccacaacttccaaccacatgacgctctttctattccctttatatattcccatctcaaatgttcttggagacacaaaatatcataaacatata

SEQ ID NO: 47 - DNA, 996 bp, Arabidopsis thaliana
  misc_feature (1)..(996): Ceres Promoter YP0115
gtcgattggatgatgaacattctacatatataattattatgtttaagcacttagacagcataaattctttctaattatataaatctaaccttgttacattgtacatctataaattacttgaagaaataacgagttctatttctttttaaaaattaaaaatactataccatatctcagtgattaagttgaaccaaaaggtacggaggagaaacaagcatttgattcttccttattttattttattcatctctcactaatgatggtggagaaaaaaagaaaatacctaacaaacaaatatatattgtcatacaaaaatatttctatatttttagttaattagtttatattcctcacttttcagggcttatataagaaagtgagcaaacacaaatcaaaatgcagcagcaaatactatcatcacccatctccttagttctattttataattcctcttctttttgttcatagctttgtaattatagtcttatttctctttaaggctcaataagaggaggtactattactacacttctctctacttttacttgtattttagcattaaaatcctaaaatccgttttaaattcaaaaataaacttagagatgtttaatctcgattcggtttttcggctttaggagaataattatatgaaattagtatggatatctttactagtttccattcaaatgattctgatttcaatctaatactctcactctttaattaaactatatgtagtgtaatttcacactgttaaatttctaccatgtcatgtatattagagttgcatagaaaattgtaaaacatccatttgaattcgaatgaaacaaaatgttttaaaataaaattttggtttttaaaagaaaaatctaaaactgaattatatcgtttaaccaagttgtaaaagtcataaaacgtagtatcttgtaaatcgctcttccacggtccaaatagacttctagtaataaacaagtaaaactaattttggtttcttac

SEQ ID NO: 48 - DNA, 1024 bp, Arabidopsis thaliana
  misc_feature (1)..(1024): Ceres Promoter YP0117
gtcagtgagtcgattggatcacagtcctttatgataaaacaaactcataattattccaccgacaacatgcgttttaaattattttttcttaaattatattatattatattgatatcaacctagctaaaataattcggatggcgaaatcggacaatttttaatagaaaaaatgggtatgaagatagtctatgattccgttcttagcgactagagggacctgctcaaatctcccgggtgatacgcgatgtcaagctcaatagaaccccacaaccgacgagaccgagaaatccttgatttgggctagaagattttgaaataaatttaatatattctaagtaacttgcttaaattttttttcaaactctaaagacataactaacataaagtaaaaaaaaaaaagttaatacatgggaagaaaaaaattaaactaatgattagctctctaacgtgtttaatctcgtatcaagtttttttttaaaaattatattgctattaaaacattgtactattgtttctattttgtttagctattattcttgtgaaatgaaaagttgtgtttattcaattactaaatggcaatatttatcttggaaaactatacctctaattggattaggccctagacatcctctttagcttattgacgttaaaattattcccaaaactattaaagtttagtagtttgaaagatgcatcaagacctactcagataggtaaaagtagaaaactacagttagtgtgattatattttaaaatatataaaacaatcttattaaactaaatattcaagatatatactcaaatggaagataaaaacatttagtctgttaccactaccagcctagctagtcactaatagtcactttggaactgagtagatatttgcatcttgagttaccatggactcaaaagtccaaaaagagaccccgagtgaaaatgctaccaacttaataacaaagaagcatttacagcggtcaaaaagtatctataaatgtttacacaacagtagtcataagcaccattg

SEQ ID NO: 49 - DNA, 1000 bp, Arabidopsis thaliana
  misc_feature (1)..(1000): Ceres Promoter YP0119
taccaaaaataaggagtttccaaaagatggttctgatgagaaacagagcccatccctctccttttccccttcccatgaaagaaatcggatggtcctccttcaatgtcctccacctactcttctcttctttctttttttctttcttattattaaccatttaattaatttccccttcaatttcagtttctagttctgtaaaaagaaaatacacatctcacttatagatatccatatctatttatatgcatgtatagagaataaaaaagtgtgagtttctaggtatgttgagtatgtgctgtttggacaattgttagatgatctgtccatttttttcttttttcttctgtgtataaatatatttgagcacaaagaaaaactaataaccttctgttttcagcaagtagggtcttataaccttcaaagaaatattccttcaattgaaaacccataaaccaaaatagatattacaaaaggaaagagagatattttcaagaacaacataattagaaaagcagaagcagcagttaagtggtactgagataaatgatatagtttctcttcaagaacagtttctcattacccaccttctcctttttgctgatctatcgtaatcttgagaactcaggtaaggttgtgaatattatgcaccattcattaaccctaaaaataagagatttaaaataaatgtttcttctttctctgattcttgtgtaaccaattcatgggtttgatatgtttcttggttattgcttatcaacaaagagatttgatcattataaagtagattaataactcttaaacacacaaagtttctttattttttagttacatccctaattctagaccagaacatggatttgatctatttcttggttatgtattcttgatcaggaaaagggatttgatcatcaagattagccttctctctctctctctagatatctttcttgaatttagaaatctttatttaattatttggtgatgtcatatataggatcaa

SEQ ID NO: 50 - DNA, 999 bp, Arabidopsis thaliana
  misc_feature (1)..(999): Ceres Promoter YP0120
tagtttttgatttaatctacgtttttcttaatcataaatgggtaattattagtttttgcaaaatcaaaatccaaaaattgttctaaacactgcaaccatttaaggcctatatcactcagaaaatttctggtgggagaactaatcgtttgtcctttctaaatctcacatattagaatttagaattagtgtgctacataagaatattagttcagctcggaacaactattttttggtaaaacagagaacttaaacaaatgcattattttatcaacatgcattttgaattgaatataaaatttcataattgtaaagacataaattacataaaattttacatgaaaaaatagatatagaaagaaaatgaaactaactgatgatatgctctctaaattttttaatctcataacaagaattcaaattaattagttcatatttttggttaatataacatttacctgtctaagttggaactttcatttttttctgttttgtttagtcagtattcttaatgtgaaacggaaagttgaatttattcaaacttaaattcaatagcattaattaaaggcgaaagctattatctctacatgtggttcaaactagacatccaatttaattagcttattgacgttgaaatgttttccaaaactactatagtttggcaatttgaaagatgcatcagaactactcagacaggtaaaagtagaacctctagctgtgtgaattgtatgttagtccataaagaacatcttgtaaacttcatacttaagatatatattacaatatatacttgaatggtagataaaaacgattagtctgattgctagcatactcacaactatttggaaatgagtaagatattggcattctagagttactactatggagacaaaagtcgaataaaagagacctcacgtgaaaatgttacgagctagtaaaaaaagcatttacactaacggtaaaaaaagtatctataaatgtttacacaaggtagtagtcatt

SEQ ID NO: 51 - DNA, 999 bp, Arabidopsis thaliana
  misc_feature (1)..(999): Ceres Promoter YP0121
ttggattttttttttgttgagtcagcagaccatctaatctctctttttccaccacagcctgctttctatgaagcatttgggcttacggttgtggaatcaatgacttgtgcactcccaacgtttgctacctgtcatggtggacccgcagagattatcgaaaacggagtttctgggttccacattgacccatatcatccagaccaggttgcagctaccttggtcagcttctttgagacctgtaacaccaatccaaatcattgggttaaaatctctgaaggagggctcaagcgaatctatgaaaggttggcccattctccttgacaggcttaacaatacaacttgtatcgcttcaacaagatgatggcttaataaggatttttgcatgtataggtacacatggaagaagtactcagagagactgcttaccctggctggagtctatgcattctggaaacatgtgtctaagctcgaaaggagagaaacacgacgttacctagagatgttttactcattgaaatttcgtgatttggttagtgtaacccactgttattcttttgatgtctacatctactttacttacattattcttttcttcggtttgcaggccaattcaatcccgctggcaacagatgagaactgatcatgacagggtaggattttatttcctgcactttctttagatcttttgtttgtgttatcttgaataaaaattgttgggttttgtttccttcagtggtttgattttggacttatttgtgttaatgttgttttggctgttctcttaatatcaataacaaataaatttactggttggtatctaagatctaacaatagttactatttttagaggtaaagacaccaaccttgttatattggtcagagagctaaaaccttgacttgttgggaaaacaaaactctaatgacagaaaatctgacatgatgccttataattcacagcctcatgttctacataaatcctaacaatagcactttgtttct

SEQ ID NO: 52 - DNA, 1004 bp, Arabidopsis thaliana
  misc_feature (1)..(1004): Ceres Promoter YP0128
gataaactgataatggaaaagaacaaagaaaccagtttttaactatttgcatatgtaatttatttgttgcaaattatatttagttaaaatgtttcctctatttatatatatatatatcagtcaagcactatgtataagaaatgtcaatttataaatttttacatgtcctttaacagaaagaaaatgaatttttacatgtcattcatagagagtcactcgtttatttcttatatagagaataacacactcacatgcatatgcatgcaatatgatacattttatgacaaagataatcaacggaaacggtcaagacataatttgataaacaacttgcacgatgcacagatctgatcaaatatataactctttaacatatccaaaatattcaaaaagaaaaactcgatccaaactagcaacatcacgctcacgcggtaggctaaaaatttattaatctccaaaagtctttcttatgaacactgcaaacacaacaacttgaaaagtcatataggtttagatgatgacgcgtattggctatcgcttaccggagtggctcataaatacaataaacaatacgtaaaagtcaaagtcaaatatatttagtcaactataaccattaatcgggcaaaacctttagctgtcaaaacaacgtgaaaacgatatttgtatatatcatcaagaatcagtagataagagaatgatttaatcccctgactattacaattttggtgtaataaacagtctctattggtttttattctttgttttaatttctcatgacctatagagagaattaggtagtttcgaaaattggctaatcaacttttgaaaactactgtctactttgcttaaattctctacacttagtttcggataagataattgtcggactaatagttaatcccttgacaatctttgatattataaaaggtttagttaatctcttctctatataaatattcatacaccagctttcaaaaatatataatccaaacaccaaaaacaaa

SEQ ID NO: 53 - DNA, 1001 bp, Arabidopsis thaliana
  misc_feature (1)..(1001): Ceres Promoter YP0137
gtggcacatgctgaaaccccgagcatctctccggaagacacgcgtcgttcgctccaaagaaaacagtcacagctgccggagaatctccgccgtcttcttctgccaccggaaaaactctctccaccactttcagtgcccacctcgtgttatatccactgtatcctcgtagcaccatatcagcctaataaaattttatgtatcaaattttaagacatagccgaaactacactatactagacaataataatatgatttgtttcctgaaaaattatggtttcatgagaaacattaatcatctataaaacaaattagctatggcatcgaagagttatcaatcaaaactgatgaatctttacttaatatatacaacatatctttaccttgcggcggagaagatcggcgagagaagcaccccagccaccgtcactaaaggattcttcagtgatggaatcaccaaagagaaaaaccttccgtctcatcatcttccacacaatcttcttgagaaaatctgagagataagaaaggtgtagtggttttgctgaagtgatcgtgtttgatttagtaaagaaatgctttatttattgttgggggaaacataaataaataaagtaaaagtggatgcactaaatgctttcacccactaatcaccgacctttcatggtttattgtgaaatacactcatagatagacatacaataccttatgtacgtaaataacattttatttgtcgacacttatgtaagtaacgcatagattattttctatgtgattgccactctcagactctcagtttcaaccaataataacaataactacaacaacattaatcataaacatatgctctggtttacaattaaagcttagattaagaaactgtaacaacgttacagaaaaaaaatgttatttacgttttgtaagattagtctctagaatcatcaccgttttttatatattaatgattctttcttatatataaaacctttctcgaaatacccatgaaa

SEQ ID NO: 54 - DNA, 1001 bp, Arabidopsis thaliana
  misc_feature (1)..(1001): Ceres Promoter YP0143
atacaacagatggcagatatcgagttaaatacgtgaatcagccgttacgatattttaaaactagaaaattatttaaaaatattgcaaaataccatttaatttcattgttcataaaaaaaagaaattcaaaaacttaaaaactgattcaaaaatttggattaattctcattaacagtcttcaacactacaacaacatgtttctaatttattttatattttaataattaaacaatatatacgtctgcacattgttgctccgacataatctagtataaaaatagttgcagcatatgtgaaaagcaagcagcatttatcactcaatacttttaattttatctgttgtatgtattaaggttttgtagctttaagaaaacgcttataatataaaataacttctaaaagatatttcatgcgtatacaataaatatttgtgaaaaaacatttcgaaaacgtgtacaatatataaactattgtgttatcttttgacattcaaacaaatgttgacaatgtaattttatccatgatatgattggccaattagctgcgaggtaaaaatccgtatacgagtaaaagtaagataaaatttcgcaagaagatttttagcaggaaatctaagacaagtgtcatgaacgtgtcaatcaacaaacgaaaaggagaattatagaatccagattcgacgtaccacattaataaatatcaaaacattttatgttattttatttttgctctggcagttacactctttttcattgctccaataaaaaaatcactcgcatgcatgcatatatatacaccatagtaaactccgcctcttcttcattttaaaagtatcagtttacactgacacaatccttaactattttcctttgttcttcttcatctttattacacatttttttcaaggtaacaaataatctttttaagtcacttttatactctttaaatcttagattgatatatgaatgcatgttaatatttcaagatttataggtctaccaaac

SEQ ID NO: 55 - DNA, 1003 bp, Arabidopsis thaliana
  misc_feature (1)..(1003): Ceres Promoter YP0144
aaacgttgcaagattattgattgtgagaaagagtgctcaaggtagtactgatttctgtaaagctcacggtggtgggaaacgatgttcttggggagatgggaaatgtgagaaaatttgctagaggaaagaagcggtttatgcgctgcgcataacactattatgtctcgggagaacaaagatggaagcaagagcggtttgattggaccgggactctttagtggccttgtttttggctctacttctgatcattctcagtctggagctagcgctgtctctgattgtactgattctgttgaacgaatacagtttgagaataggcagaagaacaagaagatgatgataccgatgcaggttctagtaccttcatcaatgaaatctccaagtaattcacatgaaggagaaacaaacatctatgacttcatggttccggaggagagagttcacggcggtgggctagtaatgtctttacttggtggctccattgatcgaaactgaaagccatttatggtaaaagtgtcacattctcagcaaaaacctgtgtaaagctgtaaaatgtgtgggaatctccgaatctgtttgtagccggttacgttatgctggatcaaaaactcaagatttgttggatattgttatgctggatcggtggtgaaaccacttcccggttgctaaataaataaacgtttttgttttataatctttttcactaaacggcagtatgggcctttagtgggcttcctttaagcgaccaatacaatcgtcgcaccggaatctactaccatttataggtttattcatgtaaaacctcggaaaatttgagagccacaacggtcaagagacaaaaacaacttgaagataaagggataaggaaggcttcctacatgatggacaacatttctttccacacaaattctcataataaaaatcttataatacaaatacttacgtcataatcattcaatctagtccccatgttttaaggtcctgtttcttgtctgatacaaat

SEQ ID NO: 56 - DNA, 1004 bp, Arabidopsis thaliana
  misc_feature (1)..(1004): Ceres Promoter YP0156
ttggtttgcattgtgaagatttgtattaactatagaacattgaattgatggtgttaagttcttacacaagcgtgcttctcggtttgaactgtttcttttgtatgttgaatcagagcttagtttataggaaccagagtatctacttagtcattctctgatgctaagtgctaaggttctacctagttgccctctaggcccttatgttattgataacttatgaagctatttgaacacttgattcttaggagacctaagttggtacagccagatagagtgtatgttcttgttctctatgtgacaggatcaagctgccacacatagttcaagggtatgctctgtgtgggtttgctcagattgaggacaaatctatacaaggaagtagagtctttgacattttgatgttgtatgataagaagaagaaaggagagtaataaagaaagagaaaagggaaacagaaacacgtgggagaacatcccaaagaggaagcacacgcggatcttcatgcaaagctccccgattctcccatgtggtccctttctccctttgtccccctcctctttcttcttttctcattttactcctttttttaccattatacaacgaatcttttttatcataattttttggttttggtttattttccaataacactttcttggttacttcccattctcactttttcatataagaaactcactttgggaaacttatgtttgagaatgacaagtctttttagagaaagtgatgtaacaaatctaaagtgattatataataaccttgcacaatgtttttgattttttgtaagattcgaatattaggtttattattcgtagggaataaacttactttcaaaagcgttcataagttaatactttcatatatgatcataagtacggacactattgttttttgtttgtttgtgtttattctaaaagaaagtagcttttaattgaaatgtcctcggaggcacagtttaaagttcgagtgtaacagtttctaaggca

SEQ ID NO: 57 - DNA, 1000 bp, Arabidopsis thaliana
  misc_feature (1)..(1000): Ceres Promoter YP0158
ttattagattaatagattgcattgcattgcttgtgctttcaatttacaaattgtctcccaactccatcgacacatctctttttgtgtatataagattcagacttgttatattttttttataaatatgttattagcatcttaagttaaattgattttttatatctgcattaaggattacacgactatatttgcgattgtgtgttggttaaaatataatttaggattgtctttaactacatttaggattatatgactatatttggttaaatataaaatctagctgtgattattagtattcaaaaataagtagcctaaccaattaaaacaacggctattggggcaaattagaacattttagtgtgtccaaaatataatggtcattaggtcatattcctcctagcttcatcgcagcataattgaatgattgccttatttagaagagcttttccactttcccaaaatctaggtgggatctttttgttttgaccttcatttttcttgtttaccatttttagctaaattatttacgattacaaaagatatcaaaagttggatcataatacaatttatagacttactgtagaaaattcgtatgtacaagtacaacaaattcttcataataaattttgaaaattctattacaaatgttgtaagaaatagaatttgaaatatatataaactaaggagaaaaaaaaagagaacatgcattgctctagtcagagtggaccaacatcaacgagataagataacataaaaaccaactcaccataactaaaaacatcccaagagatccaacgattcatatcaaacacaaaaacatcgaacgatcagatttaaaccatctctggtatctccaaaacacaaacacttttttttttcttttgtctgaatggaacaaaagcatgcgacatctctgtgtctttatcttctctctcctcttcttgaaaaactgaacctttaattctttcttcacatctcctttagctttctgaagctgcta

SEQ ID NO: 58 - DNA, 1005 bp, Arabidopsis thaliana
  misc_feature (1)..(1005): Ceres Promoter YP0188
gattggtatgaaatttcggagaccaacaaaaaaaactttattgagcttggagtgaagctatatatatggggcaagatcataatatgtttatatcggccttttcgttaactgaaaataatagttttgagaaatatatcaaatggtaaacagacatcatctttgaaaaataccatcaatgaagttaatattgttattggcatatggtttacccatcttaattttaatgcaaccaaacaaacaagaaacaaaaactgtataagatacaaggtgttttacgattttccgtcttaaaaccgaaatatttttgttcctacgactttaaacggactttgcttaagttgtgtgcatgtaagctcgtcgtccctcgattgtcatcaacattcaccaatatcagcctctatcacacgagtgaaggtggtgattcggcttaatgaaaacagagaaatatttcaatatgattcctattaaattttaaatcttttttctcaatctctagattttcattaaaagcatcatgatttttttccactatgttcatatatctctatcacagttttaggtacattgtagaaattggataagatacgtcatacgtctaacatgaatttggtctagcaaggaaggtttgagataataagtgaaaagaaaacacaagataataaattataatttataaatgctttatagtattgaaaaataagatgattttttttttttttaataccggattggctgatccacttatgatgactcaaatgttattaagtttcaagacaatttatgatgacacaaatcacaatgagtcaatagtagccacgaagccagaaaaaaaaaatgtactacaaaaagataatgatagtacaaaatgatacgtcgtactgccacatgtacgacacaactcgattaccaaaaagcagagccatccaaccataaaactcaaaacacacagattccactggcgtgtgctctcctcacttcactcgtccttgaaacttgaggtactga

SEQ ID NO: 59 - DNA, 1002 bp, Arabidopsis thaliana
  misc_feature (1)..(1002): Ceres Promoter YP0190
taaatagtgacattggtaagaagaaaaaaaacactattaaatagtgaaaaaatggtttataactctcttaattaacattacttattattgctagcacctaaaatctcccacaaaatatttgttgtaaaacacaaatttacaaaatgattttgtttttaaattagtaacacatgttcatatatacgttaataagaacataccctatatgattttatataaaaaaatttctttgagacgtcttattcttttttctttaataatatgcaattgtgagagtttggatttgaatggtagcattagaagcaaacttgaaccaaacatatttcatgaagtcaaacttgaaccaatgtgatcactaatcacagtgttcgcagtgtaaggcatcagaaaatagaagaagggacatagctatgaatcatataatcttgacacatgttttataggttttaggtgtgtatgctaacaaaaaatgagacagctttcttctaatagacttaatatttgggctaaatgtaccacagttgtgaatttcttacaaaaatgggccgagctacaaaaaactacaggcccactctcaactcttatcaaacgacagcgttttacttttttaaaagcacacactttttgtttggtgtcggtgacggtgagtttcgtccgctcttcctttaaattgaagcaacggttttgatccgatcaaatccaacggtgctgattacacaaagcccgagacgaaaacgttgactattaagttaggttttaatctcagccgttaatctacaaatcaacggttccctgtaaaacgaatcttccttccttcttcacttccgcgtcttctctctcaatcacctcaaaaaaatcgatttcatcaaaatattcacccgcccgaatttgactctccgatcatcgtctccgaatctagatcgacgagatcaaaaccctagaaatctaaatcggaatgagaaattgattttgatacgaattagggatctgtgtgttgaggac

SEQ ID NO: 60 - DNA, 995 bp, Arabidopsis thaliana
  misc_feature (1)..(995): Ceres Promoter YP0212
agtcgattggtacactcttaatttaattagagtaagagatcaacaaaaatatagaattttctttatatcgaagtgctacgaccttatatatatagaaaaaaaagcataggtgaatctctaaattgagattgtgctgtagtaaacatattaagtttttagtttttttaagaaatgaatctttttgttgattaattcaaactagtagtcattaagattccggagattccaatttagaaaagtcaaagattcaaagaacaagtccaggtccacatgttgaatccgattcatcatccactcatccttcatatcttcctccaccgtctccgcccaaaaaatcaataacaataaaaaatcctaaaaaaacatatttgattttgaaaaaactttatcatatattatattaattaaatagttatccgatgactcatcctatggtcagggccttgctgtctctgacgtccttaattatcattatttttaaatttgtctctctcagaaaattacgccacaatcttcctctttcccttttccgaaaacagctaatatttgtggacctaaactaaataacgtagcctctagattttatataattactaatactatatgctactacttgttattatttactccaatcatatatgataccaatcaagaatcactacataagtagaaaactttgcaatgagtccattaattaaaattaagaataaacttaaaattttatggtattttaagattccctttggattgtaatgacaagaaatcagcaaattagtcgtaactcgtaagaataaacaagatcaatttttactttctttacaaagattccgttgtaattttagaaatttttttttgtcactgtttttttatagattaatttatctgcatcaatccgattaagaagtgtacacatgggcatctatatatatctaacaggtaaaacgtgtatgtacatgcataaggttttacgtgcttctataaatatatgtggcagt

SEQ ID NO: 61 - DNA, 1024 bp, Arabidopsis thaliana
  misc_feature (1)..(1024): Ceres Promoter YP0214
ccagtcgattggcgcctcgcatgcctatcatatttaaccgtcaataatggatttggcggttttggtaggccgggtcaaccggattaaaagaaaacggtttggagtccttccttgcaattgaattttcacacattcgggttttgtgatttctctgtcataatgggcccggcacatatggttcataacccatgtgggcctatggtataatttttccaattaaaactattgttaggtcgataaaacaaaaaacaataaaaacgagtggaatacacataccaaaaagaatgtgatgaacattagtaattttattttgatggttaatgaaaaacaaaataaatgcatcttggcatcttccgttggaaagcgcaaatagggcagattttcagacagatatcactatgatggggggtgagagaaagaaaacgaggcgtacctaatgtaacactacttaattagtcgttagttataggactttttttttgtttgggcctagttataggatcataaggtaaaaatgaagaatgaatattagattagtaggagctaatgatggagttaagtatgcacgtgtaagaactgggaagtgaaacctcctgtatggtgaagaaactatacaacaaagccctttgttggtgtatacgtattaatttttattcttttatcacaagcgatacgtatcttaagacataataaatatatatcttactcataataaatatcttaagatatatatacagtatacacctgtatatatataataaataggcatatagtagaaattaatatgagttgttgttgttgcaaatatataaatcaatcaaaagatttaaaacccaccattcaatcttggtaagtaacgaaaaaaaagggaagcaagaagaaccacagaaaagggggctaacaactagacacgtagatcttcatctgcccgtccatctaacctaccacactctcatcttctttttcccgtgtcagtttgttatataagctctcactctccggtatatttccccattgcactgga

SEQ ID NO: 62 - DNA, 911 bp, Arabidopsis thaliana
  misc_feature (1)..(911): Ceres Promoter YP0263
atctagctgtggattccaccaaaattctggcagggccatgatctaaaaactgagactgcgcgtgttgttttgcagtgatttgtatttcatatttgcaccatcctacacagtccacttggtatcgtaaccaaacataaggagaacctaattacattattgttttaatttcgtcaaactggtttttaccttttagttacatagttgattcttcatttgttttagtagttatggagcacaataatgtgcaacaaagaaagatcatagtggattaatatgttgagaggtcagaaattcttggttaacaaaaaaaagttacaaggactgagattttgggtgggagaaagccatagcttttaaaacatgattgaacttaaaagtgatgttatggtttgaggggaaaaaggttgatgtcaactaagatagttgaagtaatgtcttaaactaaagtaaaccaccggtccaaccgtggtccggaagcatctctggtatgatttatcctaaaaatcaaaatagtagaaacatactttaaatatatacattgatcggacgaaaattgtaaactagtatagtttcaaaaactagttgaacaggttatgtaccttaaacatttatttcaaacttaaacactaaagaacatatatgaatagaagtttatataaattactatatatctaccataaatctcttataattatgatgtcacgatgaggaagtgttgaaacgttaaaatgccaaaatataagcatgcgacggaattttggcagaagattgtagagttgtaatctgtcgcaatcattactcgtgctagcatttttcattttcccttcatttgtggataacgcacgatataacattctacacaccaacaagattctataaaaacgcaaaggttgtctccatagaatatcgtc

SEQ ID NO: 63 - DNA, 999 bp, Arabidopsis thaliana
  misc_feature (1)..(999): Ceres Promoter YP0275
aaacattaatatgtagtaactatgggcgtatgctttactttttaaaatgggcctatgctataattgaatgacaaggattaaacaactaataaaattgtagatgggttaagatgacttatttttttacttaccaatttataaatgggcttcgatgtactgaaatatatcgcgcctattaacgaggccattcaacgaatgttttaagggccctatttcgacattttaaagaacacctaggtcatcattccagaaatggatattataggatttagataatttcccacgtttggtttatttatctattttttgacgttgaccaacataatcgtgcccaaccgtttcacgcaacgaatttatatacgaaatatatatatttttcaaattaagataccacaatcaaaacagctgttgattaacaaagagattttttttttttggttttgagttacaataacgttagaggataaggtttcttgcaacgattaggaaatcgtataaaataaaatatgttataattaagtgttttattttataatgagtattaatataaataaaacctgcaaaaggatagggatattgaataataaagagaaacgaaagagcaattttacttctttataattgaaattatgtgaatgttatgtttacaatgaatgattcatcgttctatatattgaagtaaagaatgagtttattgtgcttgcataatgacgttaacttcacatatacacttattacataacatttatcacatgtgcgtctttttttttttttactttgtaaaatttcctcacttttaagacttttataacaattactagtaaaataaagttgcttggggctacaccctttctccctccaacaactctatttatagataacattatatcaaaatcaaaacatagtccctttcttctataaaggttttttcacaaccaaatttccattataaatcaaaaaataaaaacttaattagtttttacagaagaaaagaaaaca

SEQ ID NO: 64 - DNA, 981 bp, Arabidopsis thaliana
  misc_feature (1)..(981): Ceres Promoter YP0285
gggattatatatgatagacgattgtatttgcgggacattgagatgtttccgaaaatagtcatcaaatatcaaaccagaatttgatgtgaaaacactaattaaaacatataattgacaactagactatatcatttgttaagttgagcgttgaaagaaaatgaaagagtgtagactgtagtacgtatgagtttcccaaaagatggtgcttgaatattattgggaagagactttggttggttcggttgaatgaagatttttacctgccatgttgatagagaaaggcaaataaatgtaggggtcgatgtctaacgtaaagactggatcaaccaagagtcctcctcctcgtcttcaccaaaaaaaaagagtcctcctcgtggaaacttatttcttctccagccaagatctcatctcatctcttcactctatgaaatataaaggaatcttatggtttttctaaaaactatagtacgtctatataccaaaggaaacaatataaaatcagttaatctgataaattttgagtaaataataaagttaactttgtacttacctatatcaaactaattcacaaaataaagtaataataacaaagaatttttagtagatccacaatatacacacacactatgagaaatcataatagagaattttaatgattttgtctaactcatagcaacaagtcgctttggccgagtggttaaggcgtgtgcctgctaagtacatgggctctgcccgcgagagttcgaatctctcaggcgacgtttcttttgttttcggccataaaggaaaaagcccaattaacacgtctcgcttataagcccataaagcaaacaatgggctgtctctgtctcactcacacacgcgttttcctactttttgactatttttataaccggcgggtctgacttaattagggttttctttaataatcagacactctctcactcgtttcgtcaacattgaacacagacaaaaccgcgt

SEQ ID NO: 65 - DNA, 996 bp, Arabidopsis thaliana
  misc_feature (1)..(996): Ceres Promoter YP0286
gaaaacaatcataggttacgctattatcatcgaaaggtatgtgatgcatattcccattgaaccagatttccatatattttatttgtaaagtgataatgaatcacaagatgattcaatattaaaaatgggtaactcactttgacgtgtagtacgtggaagaatagttagctatcacgcatacatatatctatgaataagtgtgtatgacataagaaactaaaatatttacctaaagtccagttactcatactgatttcatgcatatatgtattatttatttatttttaataaagaagcgattggtgttttcatagaaatcatgatagattgataggtatttcagttccacaaatctagatctgtgtgctatacatgcatgtattaattttttccccttaaatcatttcagttgataatattgctctttgttccaactttagaaaaggtatgaaccaacctgacgattaacaagtaaacattaattaatctttatatgagataaaaccgaggatatatatgattgtgttgctgtctattgatgatgtgtcgatattatgcttgttgtaccaatgctcgagccgagcgtgatcgatgccttgacaaactatatatgtttcccgaattaattaagttttgtatcttaattagaataacatttttatacaatgtaatttctcaagcagacaagatatgtatcctatattaattactatatatgaattgccgggcacctaccaggatgtttcaaatacgagagcccattagtttccacgtaaatcacaatgacgcgacaaaatctagaatcgtgtcaaaactctatcaatacaataatatatatttcaagggcaatttcgacttctcctcaactcaatgattcaacgccatgaatctctatataaaggctacaacaccacaaaggatcatcagtcatcacaaccacattaactcttcaccactatctctcaatctctcgtttcatttcttgacgcgtgaaaa

SEQ ID NO: 66 - DNA, 1000 bp, Arabidopsis thaliana
  misc_feature (1)..(1000): Ceres Promoter YP0337
taatttttttatttttggaactaacacttattagtttaggtttccatcacctatttaattcgtaattcttatacatgcatataatagagatacatatatacaaatttatgatcatttttgcacaacatgtgatctcattcattagtatgcattatgcgaaaacctcgacgcgcaaaagacacgtaatagctaataatgttactcatttataatgattgaagcaagacgaaaacaacaacatatatatcaaattgtaaactagatatttcttaaaagtgaaaaaaaacaaagaaatataaaggacaattttgagtcagtctcttaatattaaaacatatatacataaataagcacaaacgtggttacctgtcttcatgcaatgtggactttagtttatctaatcaaaatcaaaataaaaggtgtaatagttctcgtcatttttcaaattttaaaaatcagaaccaagtgatttttgtttgagtattgatccattgtttaaacaatttaacacagtatatacgtctcttgagatgttgacatgatgataaaatacgagatcgtctcttggttttcgaattttgaactttaatagttttcttttttagggaaactttaatagttgtttatcataagattagtcacctaatggttacgttgcagtaccgaaccaattttttacccttttttctaaatgtggtcgtggcataatttccaaaagagatccaaaacccggtttgctcaactgataagccggtcggttctggtttgaaaaacaagaaataatctgaaagtgtgaaacagcaacgtgtctcggtgtttcatgagccacctgccacctcattcacgtcggtcattttgtcgtttcacggttcacgctctagacacgtgctctgtccccaccatgactttcgctgccgactcgcttcgctttgcaaactcaaacatgtgtgtatatgtaagtttcatcctaataagcatctcttaccacattaattaaaaa

SEQ ID NO: 67 - DNA, 1000 bp, Arabidopsis thaliana
  misc_feature (1)..(1000): Ceres Promoter YP0356
ttagttcattgaaacgtcaactttttacttgcaaccactttgtaggaccattaactgcaaaataagaattctctaagcttcacaaggggttcgtttggtgctataaaaacattgttttaagaactggtttactggttctataaatctataaatccaaatatgaagtatggcaataataataacatgttagcacaaaaaatactcattaaattcctacccaaaaaaaatctttatatgaaactaaaacttatatacacaataatagtgatacaaagtaggtcttgatattcaactattcgggattttctggtttcgagtaattcgtataaaaggtttaagatctattatgttcactgaaatcttaactttgttttgtttccagttttaactagtagaaattgaaatttttaaaaattgttacttacaataaaatttgaatcaatatccttaatcaaaggatcttaagactagcacaattaaaacatataacgtagaatatctgaaataactcgaaaatatctgaactaagttagtagttttaaaatataatcccggtttggaccgggcagtatgtacttcaatacttgtgggttttgacgattttggatcggattgggcgggccagccagattgatctattacaaatttcacctgtcaacgctaactccgaacttaatcaaagattttgagctaaggaaaactaatcagtgatcacccaaagaaaacattcgtgaataattgtttgctttccatggcagcaaaacaaataggacccaaataggaatgtcaaaaaaaagaaagacacgaaacgaagtagtataacgtaacacacaaaaataaactagagatattaaaaacacatgtccacacatggatacaagagcatttaaggagcagaaggcacgtagtggttagaaggtatgtgatataattaatcggcccaaatagattggtaagtagtagccgtctatatcatccatactcatcataacttcaacct

SEQ ID NO: 68 - DNA, 1000 bp, Arabidopsis thaliana
  misc_feature (1)..(1000): Ceres Promoter YP0374
aagacacccgtaaatgttgtcatgtagaagaaactagaaacgttaaacgcatcaaatcaagaaattaaattgaaggtaatttttaacgccgcctttcaaatattcttcctaggagaggctacaagacgcgtatttctttcgaattctccaaaccattaccattttgatatataataccgacatgccgttgataaagtttgtatgcaaatcgttcattgggtatgagcaaatgccatccattggttcttgtaattaaatggtccaaaaatagtttgttcccactactagttactaatttgtatcactctgcaaaataatcatgatataaacgtatgtgctatttctaattaaaactcaaaagtaatcaatgtacaatgcagagatgaccataaaagaacattaaaacactacttccactaaatctatggggtgccttggcaaggcaattgaataaggagaatgcatcaagatgatatagaaaatgctattcagtttataacattaatgttttggcggaaaattttctatatattagacctttctgtaaaaaaaaaaaaatgatgtagaaaatgctattatgtttcaaaaatttcgcactagtataatacggaacattgtagtttacactgctcattaccatgaaaaccaaggcagtatataccaacattaataaactaaatcgcgatttctagcacccccattaattaattttactattatacattctctttgcttctcgaaataataaacttctctatatcattctacataataaataagaaagaaatcgacaagatctaaatttagatctattcagctttttcgcctgagaagccaaaattgtgaatagaagaaagcagtcgtcatcttcccacgtttggacgaaataaaacataacaataataaaataataaatcaaatatataaatccctaatttgtctttattactccacaattttctatgtgtatatatatacccacctctctcttgtgtatttg

SEQ ID NO: 69 - DNA, 998 bp, Arabidopsis thaliana
  misc_feature (1)..(998): Ceres Promoter YP0377
tataaaccattcctataacaccatatttaaacataacaatgaattgcttggatttcaaactttattaaatttggattttaaattttaatttgattgaattatacccccttaattggataaattcaaatatgtcaactttttttttgtaagatttttttatggaaaaaaaaattgattattcactaaaaagatgacaggttacttataatttaatatatgtaaaccctaaaaagaagaaaatagtttctgttttcactttaggtcttattatctaaacttctttaagaaaatcgcaataaattggtttgagttctaactttaaacacattaatatttgtgtgctatttaaaaaataatttacaaaaaaaaaaacaaattgacagaaaatatcaggttttgtaataagatatttcctgataaatatttagggaatataacatatcaaaagattcaaattctgaaaatcaagaatggtagacatgtgaaagttgtcatcaatatggtccacttttctttgctctataacccaaaattgaccctgacagtcaacttgtacacgcggccaaacctttttataatcatgctatttatttccttcatttttattctatttgctatctaactgatttttcattaacatgataccagaaatgaatttagatggattaattcttttccatccacgacatctggaaacacttatctcctaattaaccttactttttttttagtttgtgtgctccttcataaaatctatattgtttaaaacaaaggtcaataaatataaatatggataagtataataaatctttattggatatttctttttttaaaaaagaaataaatcttttttggatattttcgtggcagcatcataatgagagactacgtcgaaaccgctggcaaccacttttgccgcgtttaatttctttctgaggcttatataaatagatcaaaggggaaagtgagatataatacagacaaaacaagagaaaaga

SEQ ID NO: 70 - DNA, 999 bp, Arabidopsis thaliana
  misc_feature (1)..(999): Ceres Promoter YP0380
acaagtaccattcacttttttacttttcaatgtatacaatcatcatgtgataaaaaaaaaaatgtaaccaatcaacacactgagatacggccaaaaaatggtaatacataaatgtttgtaggttttgtaatttaaatactttagttaagttatgattttattatttttgcttatcacttatacgaaatcatcaatctattggtatctcttaatcccgctttttaatttccaccgcacacgcaaatcagcaaatggttccagccacgtgcatgtgaccacatattgtggtcacagtactcgtcctttttttttcttttgtaatcaataaatttcaatcctaaaacttcacacattgagcacgtcggcaacgttagctcctaaatcataacgagcaaaaaagttcaaattagggtatatgatcaattgatcatcactacatgtctacataattaatatgtattcaaccggtcggtttgttgatactcatagttaagtatatatgtgctaattagaattaggatgaatcagttcttgcaaacaactacggtttcatataatatgggagtgttatgtacaaaatgaaagaggatggatcattctgagatgttatgggctcccagtcaatcatgttttgctcgcatatgctatcttttgagtctcttcctaaactcatagaataagcacgttggttttttccaccgtcctcctcgtgaacaaaagtacaattacattttagcaaattgaaaataaccacgtggatggaccatattatatgtgatcatattgcttgtcgtcttcgttttcttttaaatgtttacaccactacttcctgacacgtgtccctattcacatcatccttgttatatcgttttacttataaaggatcacgaacaccaaaacatcaatgtgtacgtcttttgcataagaagaaacagagagcattatcaattattaacaattacacaagacagcgagattgtaaaagagtaagagagagag

SEQ ID NO: 71 - DNA, 1000 bp, Arabidopsis thaliana
  misc_feature (1)..(1000): Ceres Promoter YP0381
cacggtcaaagtattgctaacatggtcattacattgaaaaagaaaattaattgtctttactcatgtttattctatacaaataaaaatattaaccaaccatcgcactaacaaaatagaaatcttattctaatcacttaattgttgacaattaaatcattgaaaaatacacttaaatgtcaaatattcgttttgcatacttttcaatttaaatacatttaaagttcgacaagttgcgtttactatcatagaaaactaaatctcctaccaaagcgaaatgaaactactaaagcgacaggcaggttacataacctaacaaatctccacgtgtcaattaccaagagaaaaaaagagaagataagcggaacacgtggtagcacaaaaaagataatgtgatttaaattaaaaaacaaaaacaaagacacgtgacgacctgacgctgcaacatcccaccttacaacgtaataaccactgaacataagacacgtgtacgatcttgtctttgttttctcgatgaaaaccacgtgggtgctcaaagtccttgggtcagagtcttccatgattccacgtgtcgttaatgcaccaaacaagggtactttcggtattttggcttccgcaaattagacaaaacagctttttgtttgattgatttttctcttctctttttccatctaaattctctttgggctcttaatttctttttgagtgttcgttcgagatttgtcggagattttttcggtaaatgttgaaattttgtgggatttttttttatttctttattaaacttttttttattgaatttataaaaagggaaggtcgtcattaatcgaagaaatggaatcttccaaaatttgatattttgctgttttcttgggatttgaattgctctttatcatcaagaatctgttaaaatttctaatctaaaatctaagttgagaaaaagagagatctctaatttaaccggaattaatattctccgaccgaagttattatgttgcaggct

SEQ ID NO: 72 - DNA, 999 bp, Arabidopsis thaliana
  misc_feature (1)..(999): Ceres Promoter YP0384
tttaaaaaattggataaaacaccgataaaaattcacatttgcaaattttattcagtcggaatatatatttgaaacaagttttgaaatccattggacgattaaaattcattgttgagaggataaatatggatttgttcatctgaaccatgtcgttgattagtgattgactaccatgaaaaatatgttatgaaaagtataacaacttttgataaatcacatttattaacaataaatcaagacaaaatatgtcaacaataatagtagtagaagatattaattcaaattcatccgtaacaacaaaaaatcataccacaattaagtgtacagaaaaaccttttggatatatttattgtcgcttttcaatgattttcgtgaaaaggatatatttgtgtaaaataagaaggatcttgacgggtgtaaaaacatgcacaattcttaatttagaccaatcagaagacaacacgaacacttctttattataagctattaaacaaaatcttgcctattttgcttagaataatatgaagagtgactcatcagggagtggaaaatatctcaggatttgcttttagctctaacatgtcaaactatctagatgccaacaacacaaagtgcaaattcttttaatatgaaaacaacaataatatttctaatagaaaattaaaaagggaaataaaatatttttttaaaatatacaaaagaagaaggaatccatcatcaaagttttataaaattgtaatataatacaaacttgtttgcttccttgtctctccctctgtctctctcatctctcctatcttctccatatatacttcatcttcacacccaaaactccacacaaaatatctctccctctatctgcaaattttccaaagttgcatcctttcaatttccactcctctctaatataattcacattttcccactattgctgattcatttttttttgtgaattatttcaaacccacataaaaaaatctttgtttaaatttaaaacca

SEQ ID NO: 73 - DNA, 998 bp, Arabidopsis thaliana
  misc_feature (1)..(998): Ceres Promoter YP0385
actcaacaataggacaagccaaaaaaattccaattattgtgttactctattcttctaaatttgaacactaatagactatgacatatgagtatataatgtgaagtcttaagatattttcatgtgggagatgaataggccaagttggagtctgcaaacaagaagctcttgagccacgacataagccaagttgatgaccgtaattaatgaaactaaatgtgtgtggttatatattagggacccatggccatatacacaatttttgtttctgtcgatagcatgcgtttatatatatttctaaaaaaactaacatatttactggatttgagttcgaatattgacactaatataaactacgtaccaaactacatatgtttatctatatttgattgatcgaagaattctgaactgttttagaaaatttcaatacacttaacttcatcttacaacggtaaaagaaatcaccactagacaaacaatgcctcataatgtctcgaaccctcaaactcaagagtatacattttactagattagagaatttgatatcctcaagttgccaaagaattggaagcttttgttaccaaacttagaaacagaagaagccacaaaaaaagacaaagggagttaaagattgaagtgatgcatttgtctaagtgtgaaaggtctcaagtctcaactttgaaccataataacattactcacactccctttttttttctttttttttcccaaagtaccctttttaattccctctataacccactcactccattccctctttctgtcactgattcaacacgtggccacactgatgggatccacctttcctcttacccacctcccggtttatataaacccttcacaacacttcatcgctctcaaaccaactctctcttctctcttctctcctctcttctacaagaagaaaaaaaacagagcctttacacatctcaaaatcgaacttactttaaccaccaaatactgattgaacacacttgaaa

SEQ ID NO: 74 - DNA, 1000 bp, Arabidopsis thaliana
  misc_feature (1)..(1000): Ceres Promoter YP0396
catagtaaaagtgaatttaatcatactaagtaaaataagataaaacatgttatttgaatttgaatatcgtgggatgcgtatttcggtatttgattaaaggtctggaaaccggagctcctataacccgaataaaaatgcataacatgttcttccccaacgaggcgagcgggtcagggcactagggtcattgcaggcagctcataaagtcatgatcatctaggagatcaaattgtatgtcggccttctcaaaattacctctaagaatctcaaacccaatcatagaacctctaaaaagacaaagtcgtcgctttagaatgggttcggtttttggaaccatatttcacgtcaatttaatgtttagtataatttctgaacaacagaattttggatttatttgcacgtatacaaatatctaattaataaggacgactcgtgactatccttacattaagtttcactgtcgaaataacatagtacaatacttgtcgttaatttccacgtctcaagtctataccgtcatttacggagaaagaacatctctgtttttcatccaaactactattctcactttgtctatatatttaaaattaagtaaaaaagactcaatagtccaataaaatgatgaccaaatgagaagatggttttgtgccagattttaggaaaagtgagtcaaggtttcacatctcaaatttgactgcataatcttcgccattaacaacggcattatatatgtcaagccaattttccatgttgcgtacttttctattgaggtgaaaatatgggtttgttgattaatcaaagagtttgcctaactaatataactacgactttttcagtgaccattccatgtaaactctgcttagtgtttcatttgtcaacaatattgtcgttactcattaaatcaaggaaaaatatacaattgtataattttcttatattttaaaattaattttgatgtattacccctttataaataggctatcgctacaacaccaataac

SEQ ID NO: 75 - DNA, 1514 bp, Arabidopsis thaliana
  misc_feature (1)..(1514): Ceres Promoter p13879
tttcgatcctcttcttttttaggtttcttgatttgatgatcgccgccagtagagccgtcgtcggaagtttcagagattaaaaccatcaccgtgtgagttggtagcgaattaacggaaagtctaagtcaagattttttaaaaagaaatttatgtgtgaaaagaagccgttgtgtatatttatataatttagaaaatgtttcatcattttaattaaaaaattaataatttgtagaagaaagaagcattttttatacataaatcatttaccttctttactgtgtttttcttcacttacttcatttttacttttttacaaaaaagtgaaaagtaaattacgtaattggtaacataaattcactttaaatttgcatatgttttgttttcttcggaaactatatcgaaaagcaaacggaaagaacttcacaaaaaaccctagctaactaaagacgcatgtgttcttcttattcttcatatatcctctgtttcttgtgttctgttttgagtcttacattttcaatatctgactctgattactatatctaaaagggaacatgaagaacttgagaccatgttaaactgtacaatgccttcaaacatggctaactaaagatacattagatggctttacagtgtgtaatgcttattatctttaggttttttaaatcccttgtattaagttatttaccaaattatgttcttgtactgcttattggcttggttgttgtgtgctttgtaaacaacacctttggctttatttcatcctttgtaaacctactggtctttgttcagctcctcttggaagtgagtttgtatgcctggaacgggttttaatggagtgtttatcgacaaaaaaaaaatgtagcttttgaaatcacagagagtagttttatattcaaattacatgcatgcaactaagtagcaacaaagttgatatggccgagttggtctaaggcgccagattaaggttctggtccgaaagggcgtgggttcaaatcccactgtcaacattctctttttctcaaattaatatttttctgcctcaatggttcaggcccaattatactagactactatcgcgactaaaatagggactagccgaattgatccggcccagtatcagttgtgtatcaccacgttatttcaaatttcaaactaagggataaagatgtcatttgacatatgagatatttttttgctccactgagatatttttctttgtcccaagataaaatatcttttctcgcatcgtcgtctttccatttgcgcattaaaccaaaaagtgtcacgtgatatgtccccaaccactacgaattttaactacagatttaaccatggttaaaccagaattcacgtaaaccgactctaaacctagaaaatatctaaaccttggttaatatctcagcccccttataaataacgagacttcgtctacatcgttctacacatctcactgctcactactctcactgtaatcccttagatcttcttttcaaatttcaccattgcactggatg

SEQ ID NO: 76 - DNA, 1954 bp, Arabidopsis thaliana
  misc_feature (1)..(1954): Ceres Promoter p326
gtgggtaaaagtatccttctttgtgcatttggtatttttaagcatgtaataagaaaaaccaaaatagacggctggtatttaataaaaggagactaatgtatgtatagtatatgatttgtgtggaatataataaagttgtaaaatatagatgtgaagcgagtatctatcttttgactttcaaaggtgatcgatcgtgttctttgtgatagttttggtcgtcggtctacaagtcaacaaccaccttgaagttttcgcgtctcggtttcctcttcgcatctggtatccaatagcatacatataccagtgcggaaaatggcgaagactagtgggcttgaaccataaggtttggccccaatacggattccaaacaacaagcctagcgcagtcttttgggatgcataagactaaactgtcgcagtgatagacgtaagatatatcgacttgattggaatcgtctaagctaataagtttaccttgaccgtttatagttgcgtcaacgtccttatggagattgatgcccatcaaataaacctgaaaatccatcaccatgaccaccataaactcccttgctgccgctgctttggcttgagcaaggtgtttccttgtaaagctccgatctttggataaagtgttccactttttgcaagtagctctgacccctctcagagatgtcaccggaatcttagacagaacctcctctgccaaatcacttggaagatcggacaatgtcatcatttttgcaggtaatttctccttcgttgctgctttggcttgagcacggtgcttctttgtaaagctccgatctttggataagagcggatcggaatcctctaggaggtgccagtcccttgacctattaatttatagaaggttttagtgtattttgttccaatttcttctctaacttaacaaataacaactgcctcatagtcatgggcttcaaattttatcgcttggtgtatttcgttatttgcaaggccttggcccattttgagcccaataactaaatctagccttttcagaccggacatgaacttcgcatattggcgtaactgtgcagttttacctttttcggatcagacaagatcagatttagaccacccaacaatagtcagtcatatttgacaacctaagctagccgacactactaaaaagcaaacaaaagaagaattctatgttgtcattttaccggtggcaagtggacccttctataaaagagtaaagagacagcctgtgtgtgtataatctctaattatgttcaccgacacaatcacacaaacccttctctaatcacacaacttcttcatgatttacgacattaattatcattaactctttaaattcactttacatgctcaaaaatatctaatttgcagcattaatttgagtaccgataactattattataatcgtcgtgattcgcaatcttcttcattagatgctgtcaagttgtactcgcacgcggtggtccagtgaagcaaatccaacggtttaaaaccttcttacatttctagatctaatctgaaccgtcagatatctagatctcattgtctgaacacagttagatgaaactgggaatgaatctggacgaaattacgatcttacaccaaccccctcgacgagctcgtatatataaagcttatacgctcctccttcaccttcgtactactactaccaccacatttctttagctcaaccttcattactaatctccttttaaggtatgttcacttttcttcgattcatactttctcaagattcctgcatttctgtagaatttgaaccaagtgtcgatttttgtttgagagaagtgttgatttatagatctggttattgaatctagattccaatttttaattgattcgagtttgttatgtgtgtttatactacttctcattgatcttgtttgatttctctgctctgtattaggtttctttcgtgaatcagatcggaa

SEQ ID NO: 77 - DNA, 2016 bp, Arabidopsis thaliana
  misc_feature (1)..(2016): Ceres Promoter p32449
gatcggccttcttcaggtcttctctgtagctctgttacttctatcacagttatcgggtatttgagaaaaaagagttagctaaaatgaatttctccatataatcatggtttactacaggtttacttgattcgcgttagctttatctgcatccaaagttttttccatgatgttatgtcatatgtgataccgttactatgtttataactttatacagtctggttcactggagtttctgtgattatgttgagtacatactcattcatcctttggtaactctcaagtttaggttgtttgaattgcctctgttgtgatacttattgtctattgcatcaatcttctaatgcaccaccctagactatttgaacaaagagctgtttcattcttaaacctctgtgtctccttgctaaatggtcatgctttaatgtcttcacctgtctttctcttctatagatatgtagtcttgctagatagttagttctacagctctcttttgtagtcttgttagagagttagttgagatattacctcttaaaagtatccttgaacgctttccggttatgaccaatttgttgtagctccttgtaagtagaacttactgggaccagcgagacagtttatgtgaatgttcatgcttaagtgtcgaacgtatctatctctactatagctctgtagtcttgttagacagttagttttatatctccatttttttgtagtcttgctagttgagatattacctcttctcttcaaagtatccttgaacgctcaccggttatgaaatctctacactatagctctgtagtcttgctagatagttagttctttagctctctttttgtagcctagttctttagctctccttttgtagccttgctacagagtaagatgggatattacctccttgaacgctctccggttatgaccaatttgttgtagctccttgtaagtagaacttaggatagagtgagtcaactttaagaaagaacctagtatgtggcataaccagattgcaggctctgtctcggctacagtaacgtaactctatagctctttgttttgttcagaaagaaccagtgattggatgattcgtccttagaaactggacctaacaacagtcattggctttgaaatcaagccacaacaatgcctatatgaaccgtccatttcatttatccgtttcaaaccagcccattacatttcgtcccattgataaccaaaagcggttcaatcagattatgttttaattttaccaaattctttatgaagtttaaattatactcacattaaaaggattattggataatgtaaaaattctgaacaattactgattttggaaaattaacaaatattctttgaaatagaagaaaaagcctttttccttttgacaacaacatataaaatcatactcccattaaaaagattttaatgtaaaattctgaatataagatattttttacaacaacaaccaaaaatatttatttttttccttttttacagcaacaagaaggaaaaacttttttttttgtcaagaaaaggggagattatgtaaacagataaaacagggaaaataactaaccgaactctcttaattaacatcttcaaataaggaaaattatgatccgcatatttaggaagatcaatgcattaaaacaacttgcacgtggaaagagagactatacgctccacacaagttgcactaatggtacctctcacaaaccaatcaaaatactgaataatgccaacgtgtacaaattagggttttacctcacaaccatcgaacattctcgaaacattttaaacagcctggcgccatagatctaaactctcatcgaccaatttttgaccgtccgatggaaactctagcctcaacccaaaactctatataaagaaatcttttccttcgttattgcttaccaaatacaaaccctagccgccttattcgtcttcttcgttctctagttttttcctcagtctctgttcttagatcccttgtagtttccaaatcttccgataaggcct

SEQ ID NO: 78 - DNA, 667 bp, Arabidopsis thaliana
  misc_feature (1)..(667): Ceres Promoter PD1367
acagttttcttttctcatcttacaacaagtttccaggaggatagagacataaacgaagctcggattgtatcgttctttttagcttttattcacatccgaaagtcctgtagtttagattctgttatcttgcggttttgagttaatcagaaacagagtaatcaatgtaatgttgcaggctagatctttcatctttggaaatttgtttttttctcatgcaatttctttagcttgaccatgagtgactaaaagatcaatcagtagcaatgatttgatttggctaagagacatttgtccacttggcatcttgatttggatggttacaacttgcaagacccaattggatacttgctatgacaactccaactcaagagtgtcgtgtaactaagaaccttgactaatttgtaatttcaatcccaagtcatgttactatatgtttttttgtttgtattattttctctcctacaattaagctctttgacgtacgtaatctccggaaccaactcctatatccaccatttactccacgttgtctccaattattggacgttgaaacttgacacaacgtaaacgtatctacgtggttgattgtatgtacatatgtacaaacgtacacctttctcctctttcacttcatcacttggcttgtgaattcattaattcctgcgaa

SEQ ID NO: 79 - DNA, 1836 bp, Oryza sativa
  misc_feature (1)..(1836): Ceres Promoter p530c10
gcctctcgaccacgagtttagcacttgtgcaacatatatgcgtgcgatgaacatctactgatgcgccatgcgaattttagcgttcgttcatgacgcttccaacggcacagaggctgagcagcagcatgcatgcatggctcttgtgaaaacaaaaaaggttactggtaaatgacatgctgctgtagctagctagcagaatgcaaggcccatgcatatgcaatgctatgcgacaagtacagtaccagcatgtatggtagccagctaactaatctatcagcagaggcagcaagctcgtgcatggtgtgatgcacttctctccagtaatctagtggtaattttcacccaaagcgttgctcatatggacagtaattagtaatattaccaaggttcacaatcccgttacctgaccaaatactactcacgaatggtatctctggttttcgttaaaaccgttggtaaaccagcaaaaatagacaaaatttgtcaaaattttaaattttagttttttttttttaacttagccgggaaaccttgaagtttgtgctgtcgagctgtcctgggaaggacggttttggttgggattgtgaaccctggttactgcacttcatttttgaacagatattagtgcaacagacaaatgccaacgcatttttttctgtttaccggcaagctgaagcttttacgatccccatacagccgttgctgcaaacctgccaagaaagagcagcagaaacaggtgtcattttgtggtggaaagccaagtaaagtaaacagaagatggaagatagtgaggaccagggagtgaggcaggggacacatggcccacgcctccctgcacattttcgtgtataaatacaggtggatgcatcgctctcccagcatccatcggttctctgctctgttcatccatagagtttcctcctcttctcctttagtgcaaggtagagaagagcatgtgtgtgtgtgtgtgtgtgtgaactgtgaagtgcagagtgcttctgtagttctgtgttatgtccatagtgatcttgttaggattgttgctatggatgcatgatgttatggttgatctctgaattacagtagggacttttctgagatctctggattagtggggggtgctaaatttttttctggttgcatcagcttgggtttctggtattggtgtgggttcttgctctgaattttggttcagaatgtcgatttgtttgtgtttgttctctgaagttgagagtagctatgatccatccagcacagaactgcaggtcctgcctgccggctgcatatacaggacatgccattttgcaagctctgggcttatggtttctcttttggagttcttcttcttgcatgatctgtgttctctaacaaaggaagcaagatttagcaactttattcagagacaagaaaaggatctggcaaccttttgtttctgttttatcctactcgtaaagattgttatttaagcaaaaatttcccaaaagttttaaatataatttccatgatgtgccactctcatgtccttgaacctggcactcattatgggctcctcagaagtgctgtagctaatgtcactaatcttttgtatctttgttcatagtcttgtattttatgatgcttatccctttgtgctttccatgtttgatgtccaaatgtcatggcaatgtttttgacttctagtaggggttttagtacctttttgttagataagtacatccaaattctgtttatttattcaaaaatcattctgtttattcactgaaaacatttgtccattcaatggactcataaactgtctgtgtttttcaggcttgaggatccatctagaagatagca

SEQ ID NO: 80 - DNA, 3000 bp, Oryza sativa
  misc_feature (1)..(3000): Ceres Promoter pOsFIE2-2
gcttaacacatgaactaccaaaatatactgatcactttgttctagtcatacataccttaagtcattttattctgcagtgtttggattggagggagcattctagcatcccttgggtcgttccagcaaatgtggttctccaaagcagagtaagcacaacacagtattttaggttatgtttcccctatctcgtcacggacagctcacaagttaatgtgatttatctcactatagatacgaagaacatggagtatcctacatccaaaggaagtgcccatgaagttgtggagcatcgctacgatttgtgaccaaatttgggtgcatgtgggcaatcgtattacagccaccctgttgttgatctatatcgactattatccgacgatatttatcattatattatgactagttagtttgtagattttgagagggcaacataagaagcaatccagcttaacctgttatgttcttgatggtagattctagttcatgtgttgaatctgttctccctgctgtagaatgtatcgagttgctgctctctactctgtacttttagaataccttttcaatcatttggagtcagctgattgttgtactacttatacgccacctgattagtcatgtcaacaattaaacttgagcactggttaagttaagagtggcctgattgtagttgataatcacattttattcgtagacattgtatgctggatctttatcagccaccgtcagatcatcctctgtaataaatcttcatcagacgtgtgtgccaatcgcaaggaacacgaaatgcatccgaaatgttactctgagttaatcaatactataattcttggtcaaattaattatttatatctataaagtttaaattaaatttaggaaaatgaattcatgcaaatcttgtggtaagttgtcaatttcataaaaaatccagcttactactccctttttaggagtgtgttgtggctgcacacttctgccttttgatatatacggttctattctcggtgtactcctttattattattaaaacaatcccagttacttggtaagtgctaatcacgaatcaaagtcaacataacaaatcatgtgcgtacagctataactcgattacacaaacaacaaaattcatatttgaacataaatccagttgtagcatatctggtagtataaagttttttttttgtatagaagagttttaatttctgtaagttttggaaagcatttaatcctagaaattgtagtgtagctcaactaaaaaataaatgaacttgaatcgaaattgggttgtatcataaatctttaccactcaaacgaatatttatcctaaaccacaaatgactcttttcatcaaggaatgttttgttttcagcattttaaaaaaaaacttttctaatatggttttcatgtttcgttcttttgaaatttaacatctatttaatttgcacggctccataaattcaacggatacatattctgaataattactaaggaggcatatatcggctctcttaatacaaccgcttgtttctcaaaatttattttgagttttgtctacacattctcaaggacggtacaaacacactatagatgttcacaattttttttttctaaagttgattgatggacaaatgtttgaacatataaacatataagcactgaatatttgcttatgcaggaggtatttatatcaagttcgatactttactaccatagtccctaggacactaaaatgccttcaatgatctgatgaagcctaagagagaatattgatcagtggagcgacttgcaactacacatggcacaagtagactagacacggtatatattcatattaacttgttaaaattttactacttaacagttcacttgtggtgcatccatatcaattcttacttacacaatatttgtaaaaacaacctaacactataggatgacctagacaacctttatgtcaatcacacttagaagatgatcgtctttttaataaataatgtgtactacacaccatgctctccatatagatcaagatctacaaacccttccacttataaaccttaccaccaaaaactcattaagttgcttcatttatctatgctattaagaaaaaaacttatttcgtttatgccatttctagaaatggctagtcacactattcacaatattatataataaataaaagtttcaaatattcatccaccaaaaatcatcaagtcgtgggacttatatgttaattagagaagtccctttgggtgcaatcgattttggaaaccctaaattttttctatacatagaagagagagatgtctagttgcaattgcttttgcgatgtgccaaccacccttctagctttcatccacgtctacttaattgccattcttcttcttctttttcttcactattactacctcctatcttagcgaatcttcttcttcttcactattactacctcccaccttagtgaattcatcctcattgttcacaatgacattgctaagttaactaggtatgctaagtacacaattagaatataacctagagcctttgtttccatcatacttaaaagatgacatttttatatagataaagtgtgctactcacaaggcttactatatatatgtatgatacacacaaactccacaacccaaaactctttcaagttgtgtggcccatctatgctattaaaaagcccatttagcccatccaacatgagaaaccctagggttttttccctataaaagatacctaggttattgttgcttttccaccccgcccgccgccgctccctattcctatttaatcccatctctcttcctcatcaccgctctcctctctccaggcaagaggtacgcactttttgtttcggatttgaaatctttgcttcgttttactatcattggtcataagttcttttttgaagatgtttgagaataagtttatcattgagattatcgtcacttgtgataggaagtacgcaacctcaagccggacaagacgtgagcaaag

SEQ ID NO: 81 - DNA, 2023 bp, Oryza sativa
  misc_feature (1)..(2023): Ceres Promoter pOsMEA
gagagcagaacatagtagccgctgttttctgggggtgcaatttgtgcaagatcgctatccttatggaccatgcaagcaccaagcaatattaagccaggtccaacagcggtcttggggaattcagaaatgagcttaaaaacctccttgagctggccagctcagccaaggaggtccatcatgcatgtgcatgctcaatacttggaattattgcaaaatgatcggtcattgactggaagactttgcgcccttcctcagccaaccttatgtggctgcatgcatagagtaccaacaggaaggtagcgtttgttggaataaggtttgcatccagcatgtccttgtagagcttcaaagcctcagcaccttggcccatgaaggccatatccagctaattgcattccatgagaccacattcttgctatccatactgttgaagtgaagatgctccgagcttcggaaatgcttccacactatgcatacatgtcaatgagcactgtcatgacataaacattgggccccaagtcctcctcagcgataatcctatgcagccactttcccagggacaaagctccaagctgtgcacacgctgaaagagagctagaaatgatgattggatttggtcacacgctaagtaccagcatttgctcaaagagggcaattgccatctccgtccagccattctaggcataccctggtattattgctttccatgattccgattccgtggtcttctatggcatcgcattgaaggccttccttgcagactccatatcatttaacctacagtacaatatggtaattgctgtcgacactggagaattcgcagtaaatccagacttgagaggaccatgtaagcattgatcaagcagttcattcccaaacagactatacgggatcagtgccagtgctcgagtttggcttcaattccaaggccatcaacccaataaacagattaactgatgaaccaaccatgcaattcgccgagcaaacatagattaagcattgtaggcaaccaaatctggattctccatcaagtcaaagagacgccatgcagaattccacatccccgctgtatacaccgagatcaaccggtcagaacatgctcatactccgccaaccctctcttcagaacatgctcatactccgccaaccctctcttctctgcaagaggcatcctccccaattccccattgttatatctgttgctggtaagaccgttgccagcgtggttgtgtcagaccgaacagactctgcactcgccatcctcacgaacgactccagggcctccgaaccaggaagcccggccggccatcagcgtgttccacataacggtatccggcgactgcacagtgtcgaacaccttgcgtgcgtggtcacctctggacagcatgaagcgtacaggctacagcttggccaatgcggacgccacgaacgtgtcggcggcgtaacccgcgcgtgcagcgcgccgcgcgcgggctgcggagtcggttggagacgacacgccgccgccatgagagcaatgagcgaggtggcggcgaaggcgaaggagaagtagtcgaggcaagcggaagagaaggcggcagcggagaaagcgatcggggcggcggaggaggtgggtgggagggagggacgcgtagcggaggtcggaggaggagggagctgaggtttccggggcgggggtcgagagggtagtgtacggaggcgagggacacggcgaggatctggtcgaggtagcgcagtgtgaaggaaagcgcgatgaggcggagggcgccggcgaagagcggcgcggcggatagcgggaggaggcggcgccggcggggtctcatccgattggaaacagattgggaagggggagggggtaggaatacgtggcgtcggcagtattaggtagagagagaaaccctttccatcctttgtctcttagccccgaaggagagagaaaaatcagaaaaaaaaaaccctccgcgtgtgggggaagcagagctccggacgctggcgccgctcgcgccaccgcacccgcaccgcc

SEQ ID NO: 82 - DNA, 2034 bp, Oryza sativa
  misc_feature (1)..(2034): Ceres Promoter pOsYp102
gaacgacccaaacgcgtaaatggtggtactggtttccctgctttgccgagtaccagcagccacgaagaacgttacacaatcgagtacaaaatctataagagcaagtttaatagcatagccaaatactacctctaaatcatctatagccaatttaatagttcatttattcaataattacttataaacatatactacaatcattaatatatggtcttacttcttatacacataatattttggagtccgtgttacagctggctataaatataagggattttggttggatgtggtacatcctattataatgaatctagacatgaaacctgtccaaattcatcgtgctaggatacgccacatctaaccaaaatctcttatctttagggatggagagagtaataattaaatgaagctaggtagagtttcccggtcaatacgcttgcgtgtgcttataagagcatggccaacagtttcccgatactcttcccaatatcagttttgaggagttttgttggaaaaaatcgctccaacagtagacctaaatcacccctaaaagcttggcgtttccaaacccgcatatttcgttctccacttgtagggaagagactcggcgcccaatccttcaaccgcatgcacttcgcgcgcgctgtgtgaaaattttcctaccaggttcttctttgtgcgttcgtctacctgtgagtcaatccatcacgccagcagcctcatcttccccgcagctgtctgggaaagcagccatggctcccccaagcttccccagcgtcgacatttttttctcagcggcagcgccagacccatctccaacccaattgggcggaccttcgtcggcgctcccccagcaccaccaccgactcgaatcggccgtcgcccctattcatctccaatcgtccctcgaccctaccgcatcctgcagcacagcctgtctctcgcgtcagactggcgctgcgctccccccggtaatgtgcaggcgacaaaggccccatgcgatgcgaccagcagccggcgacaaccggaggtgcccagtcgctggccttcatcgaatcatcgtgcacctcggtcggagtcgatttctgattgttgctgctgctcaaatctggagcttgctattgctgagaactgcttggtggtggtactggaaatttgttgtttgctggctgatgaaaactgttgttctttgctgctaaaaactgctgcttgctagtactgaaaagtactattgcagctgctgaaatatcttgctgcttgctgctgaaaacttcaagttgttaacaccgttcacactaaaaaagctgaaattttttttctgggctgaaaaccccattgttgatgattgcagaaccaatatttttccatgtaaaatacaggagatcgtggtaataatcaagtgaaatatcattttggggcaaatactcagatcgtacctgaagccaatggaaacattgttcaatgcttaaactgtcagttatgatgtcaaagagattgatcactgaatgtcctgaaaggagccgtgaggaggatgcagcattgcagcgtgcgcgagcgtgagtggaggagaggaatgacgattctgttggtagttgtcgatgtggcctactttttttgttttgaggattaaattttgggaatctcttggagataaaaggtattctcataccttaaatcctttttagagatctaaaaaaaatgatttaggggattgaattttgggtggctgttggtgatgctctaagttgcacatcctggggaaaaacctccctaatccatcagcaaaccgatcaaccacccacgacaagtcgacgccaccgttttttttttctccctcctaagtcctaaccccacaaaaatcccgcgaactttcgtctcaccacgcgccgcgtgccccctacaaataccaaacaacacccaccacgtccactcacaaaccacgcaggaaacctcagaaaatcaccgtacgcgacgcgggcccaagaaaaccccgacagaaaccgcgcagcagcaacaccaccaccggcgtcggag

SEQ ID NO: 83 - DNA, 1877 bp, Oryza sativa
  misc_feature (1)..(1877): Ceres Promoter pOsYp285
ggcccgagttaaacgatcttccacgtgtcagcgaatcctagtcgttcgatgaatctgaatctgacttgtggtggttggacggccacgtgttaaaaaagggaaacgtccgcatcacccgatgctgggacatttgcaatttcgatccagctgtagattgaccagttgttactctcttttttttaacaccatacaaacgtaatactccctctgtcccaaaatataagtattttttttaacctcggttcagtcttcgaggtgctactttgaccaataatatttataaaaataagatgttttaaataaagagagttgcatattatgatagctcgtttaatgataaacaaagtaccatcaaatttacatgattaatctttttaatttatttgctattaatagttaaaatttaaaaagtttgacttcacactgttctaaaaatacttatattttgggacggagggagtacacattagagcaggtacaatagcagactagtagccagctataaacatattttaatgagataaaagatgagagagaacagcgggctacagatctgtagccagctgcagcacggactccaagacattgtgtgtgtatgacaggtgggaccatatattaatagtacagtaagtaactattgtatgaattggctattagattagctataggtgaattgtagctagtagtgggctatactattgaacttactcttatatctctcaatatctccagaaaactaggacgatatatattgatattaacaaagtcatcatagatatctcgctatcgacatatatattacctatcactgaaaaaataattaatcataaatgcaagcacatatactacgttcaacactgaatgtaggtagattggtagacgggttccaccgcaagaaaagcattgcaccagtgaagaaagaaacatcggaatttgtatgtagtttgttgtttgatgaattcttttgattaaaaaaaactaaaatcagagttgattcagttaatggtgttgcctacgatatacttccatatcatgatatcactgtagactatgaatcatatctttaattaaaactaaatcaagaaattaagtatgagacctcaactcaatgaagaatttctagttgaaaaacattcctagtgtgcgttcggatggaggtagggatcttctctccgttcatataaaaccggatggttcattagaacatgattaattaagcaacagttaatctaaaaataaattaatattttttaagaaatttttgtatagagatcttttgaaaaaaatacattggttagaaagcatactaataaaaagagaaaaataagaacatagtactatagtagaaaatgagaacttggagtatttgagaggatgggaaataagaagattaagaagatgcgtaaagtgaacggttaacgcatgattgattaattaaatattaattattttaaatttggaaaataaattagtatgatttttaagcaacatatatatatatatatatatatatatagaaaaacatagttttagaaaatataagcgtgtaaaacgatatgcaggaacgaaacgttgagcattcaaaatttcaaattgaacatatgaatcaagagagaataaaaaaagaggccttctaggctggcatggacaattggacatgttttcaactagggtttcaagcttcgagcatccacttttgtccttgcaaactttatacggcaaggcccgtgaatctagccccccacaccaccccacccgcccgcgccgcgcggccgcctcgcctcccctcccttctcctcctctccgcccccgccgccaggccgtccacctccgccgtctcctcccccattcgcacccaaggcgctggcgcggaaggc

SEQ ID NO: 84 - DNA, 1000 bp, Arabidopsis thaliana
  misc_feature (1)..(1000): Ceres Promoter PT0565
caccaaatatagtgttatttcaatactaaaatggtgttatggttggagatgccctaaagataaacatgacgagacacgagatttattaatttcttgatcaaccataacttaataacttaatattaatttcacttaataatttccaattaagtgaatctttacttcaccaaaagttcctaacgaactcttattttctagcatcaatattaccatgaactagcatcaatactatcatgaaaaattcctacttcctatccaactcttaataacaatgctagtcttaacaatattcatcaaaaacttgatatagaccttctaacttagccacgactagtatcggtgaataccaaaattaatgtattcatgagaacttgagatttctctaatgtattcttgttactaaacaagtaacaacactcaagaaatatcatgatcaaatattttactcataaactccatatttcacattttgaaaattttaaacagcaaatcacattgaattttcgtggtaaaagtatttaaaattgaaaaatagcagctcctgatttcaatgtataaatttatctttatatggtttatgtctccaacttattttaaaaaagagagaaagagcacccaaaaggtgaccgtttgaaattcgaatttatttccgtttgaaattcgaattcaaaaaaagtaaaccgaaccgagtctcgttactgactgtcacacattgtttccctaaaagctaattaacccatacgtggcgtaatataacaggtcagtgatcaatactaaataacagacatacacctttaaaattcgtgcacgctccaaaacaaaatctacacttcaaaatcaacggtcacgatcattcctcaaatttcaaaaaattatttaacctcacttccttcgctttgtttttaaaacctctctctctttctctttctctttcgccattaaaactctgtttcctttttcagagattctcagagaagattcattttaccctaagaaaaaa

SEQ ID NO: 85 - DNA, 999 bp, Arabidopsis thaliana
  misc_feature (1)..(999): Ceres Promoter YP0015
ttgagccttattgttgttattgacttttagccaatagaaagagatggaaattcaataattatccacaaaattccaaatcattggtgtacaaaaagatctaaggctgttatattttcaaaaaagaaagaaaagaaatgcaacaaatatggattaaactgtggtttgtaaattgagctttgcatgaaaactttatcactatgatttcactactccatatttattgactaaagtggcactaatgaatttcttaatcatgaaatcttgtatcaaaaagtactaaaataaacatgacattggcaattaggaaaattctaaattagaaattagtaaaaatgaaaggtgaaagggaaagatgatgatatgaattggttggtgaccaggagaaatgtatcccgatttttgcagacactttcagtgtccccattcatataattatggcccacctcgttaagatttttcattcaccaccataacaagatctaagcttagatttcatgtaattaaacatataatatacttgccaatactatctaataaagtatacttaagcaaaaattattactctagtgtaaggcgatgaaatataagtttagttgaaaatttatgtcgatataacaaagtataatgaattaagaccttggttttcgattaacaaactaattaaacactagttttgcctaataaaaccgggaatcgtattcaaaaccgaacgacaaaacaagggacaagttgagagacaaaaccaaatcagcatctttcttccagaaatgtcatgaccacatgacgtcatcttgacccttcttcattgtgatatctgtggataaagcgcacgtgtttaattcacgaaccttcgtagtaacgaaaaatccacaactttcatattttttaattacccactaaactaaaacaaatttggaaaaacatgaaaaactttttctttttttccaggttcgtgaacctcgtaccctctatataaacctcttaaccaccttccacata

SEQ ID NO: 86 - DNA, 999 bp, Arabidopsis thaliana
  misc_feature (1)..(999): Ceres Promoter YP0087
tgaattgagtaaaatgtgttttcaaacagttaggtggtagaaggtaaaggtaataacatcatgatcttactaaaagaattgttgcatactaactatcaatattctcaacaacataatataatgtttttttaggtaattttccattttaattttttgtgattaaacaattaaacaactcgaatgatgatgataaaaaaaaaaaattaacaactcgaataagttaaagtagcaatacacatgtcgttcaattcaaccaataaagtaagacttatatttttaagaagttgactaatagcttaataagttggaaaacttgtgtagtttcttaattcccacgtgcagtaagaaataaaaatgaaaaaaattattatatccttcccactctgcgacttttcttttattttatcaaatattaaaaagattcatatcacagtttacacattgaaatcataaacgataattatgtattttgtaataaaaagttagttctgaagctcatactttggatagtcgctagtcgctaatatgctccttgtaataattaaagtcactacgacgcacgtcaaagccgatatttagggcttaattgatgcgtgtttttcttttcatataatagtaatataaattagtactaataaagtatgatggatggttgagacagaaaagaaaaaagatgactgtatggtcatcattacaaagaagaatgtattcttcatgttcttaagaataataaaatgtcacttgtaaatcaagttggtaagcattttgagaactttgttcgatgcaacgtatgatgatttatgtagacaaaagataaaaccgtatcttcaactattgccaagaaaagataaaacctaatctagtcagtctctcaacataaatacaacccaatagccaaactgtgtccaattcggagagaaactaaactaaaacaaaacacaaaagcccaacataagcccaataaaacccattttataaacagaacattactaacactca

SEQ ID NO: 87 - DNA, 1000 bp, Arabidopsis thaliana
  misc_feature (1)..(1000): Ceres Promoter YP0093
atgatgaacattctacatatataattattatgtttaagcacttagacagcataaattctttctaattatataaatctaaccttgttacattgtacatctataaattacttgaagaaataacgagttctatttctttttaaaaattaaaaatactataccatatctcagtgattaagttgaaccaaaaggtacggaggagaaacaagcatttgattcttccttattttattttattcatctctcactaatgatggtggagaaaaaaagaaaatacctaacaaacaaatatatattgtcatacaaaaatatttctatatttttagttaattagtttatattcctcacttttcagggcttatataagaaagtgagcaaacacaaatcaaaatgcagcagcaaatactatcatcacccatctccttagttctattttataattcctcttctttttgttcatagctttgtaattatagtcttatttctctttaaggctcaataagaggaggtactattactacacttctctctacttttacttgtattttagcattaaaatcctaaaatccgttttaaattcaaaaataaacttagagatgtttaatctcgattcggtttttcggctttaggagaataattatatgaaattagtatggatatctttactagtttccattcaaatgattctgatttcaatctaatactctcactctttaattaaactatatgtagtgtaatttcacactgttaaatttctaccatgtcatgtatattagagttgcatagaaaattgtaaaacatccatttgaattcgaatgaaacaaaatgttttaaaataaaattttggtttttaaaagaaaaatctaaaactgaattatatcgtttaaccaagttgtaaaagtcataaaacgtagtatcttgtaaatcgctcttccacggtccaaatagacttctagtaataaacaagtaaaactaattttggtttcttactaattttcacaga

SEQ ID NO: 88 - DNA, 999 bp, Arabidopsis thaliana
  misc_feature (1)..(999): Ceres Promoter YP0108
ttagctgaaccaggaaattgatctcttataccagtttccgggtttagattggtttgatggcgatttgattaaacccccgaaattttatgtcgtagttgtgcatagtattattattctttgcggacaatagacgtatcgggaccaagttctgtagcaaaattgtataagcttaagtttgatgaaatttaaaggtaatcactaaaacccaaatgggacaataaaccggtgaagatttagagtttttaattttgactcatgaatctggagaaagagccctcgttaaaaggagtgaatcaatccataggggaaaaagttttgtctttttaaaaactaaagaaccaaaccttaatagaagcagctcaatgtgtgacaactttccactggcactaagataaagtgactagcgatgagtgcaattattgaaatagtagatggtaaatattacatacaagagtaaaaatatctttatgtcaatgcttaattcagtgtttctggttaacaagagaaacttctctaactttcgtaattgggtcttataaaattttatgcaattatgattttacccttttactacttttcattagctttcacgaatctattttgacaagagaaatcattagaggtaaacatgctttttggtcaagggccttaacagttccaccaatcaagctcaaaagttgtacttaaccgacatcttctgtgaaaacatataattacatgtacaaatcaaaactaccttatgaaataaatagaaatattgcagttcatttctaatttaacctcttcaacttttaaaactatttacatttctttatgtcatttctagtcattttgatgcaaattgtaccatttatggattatcttcacaaatttttaagttggtgaaaactttttggtgggtagttaaaacttgaaatagaaatttactttaccaaaataaactaatgaaaagtaatcactccactccctataataagatttccaacgttcccactaagc

SEQ ID NO: 89 - DNA, 999 bp, Arabidopsis thaliana
  misc_feature (1)..(999): Ceres Promoter YP0022
tagttccattacaatttccaaatgatttgttacaaagctacaagattattcgaaataggatttcatccataagagagaatggtgtggtcgacgctacaatgttgatttattggttgtggtttgcatcttggggatgtcaaatcctaagtttcaagttcttgtaaaaacgttttcaggtttctttaatatattttaatattaatgtaaaaagaaaagatatagcttttgtacaaaaaaatttgtttaatcactatgtaggaggatgcgatcaaattcatggaatgatgtattattagcttttctatcctcactctaaaaacaatactatagtgagttaaataatttgatcatttcaatgtagattaaaattttattaaaagaagaaaaatttaaaagcctataacaaaataaaaaaggaggctcgaggtatgatgggtgtagcagaagagctggcaacagctatcgactgagtgattacgaactcagtactcagtgttctcagctcacacactctttttttgttctctttcttttggacagctttcattttctcttttcttttttctattttgtttcaaaattccatccatattaaaataggcctgatcatgagaataaaggaaatactaatgatgagtttctcaataatgcaataagatgcaattattatgagctatttactattgaaaatgagcaaataaatgtcaaaacacaatctggttaagttagagcaactccattgtataggattcatgtagtttctaagaaaacaaaatgtattaatattttacttttacatccaaaaaaccaacttatatgagtaatagaaacgatcctaatattaggaattttagagattttctctcatctgtttcttaacttttcaatatttttattttttaaaattgtatgagtttctactaagaaactactgctggagttggtcttagcttcccaatgcttctccacctatatatatgcatatctccttcttaaaac

SEQ ID NO: 90 - DNA, 999 bp, Arabidopsis thaliana
  misc_feature (1)..(999): Ceres Promoter YP0080
aagcggcaatttagtaagaagtactcaaagtatcatttaccaaaagtatatggttttgggaagagttgttagggatgtattctttctaaacagatgatatgacgatgttcttgaaaactaatgttaaagacggaatctctggcatcttcactcgggagatatattaaaccgttgattgtagttagccatgtacttagcttagtgcacaaataatctgctgcaagaaatctttttctattataatatctctcatttaaacattagaacatattgtttaacttgttcttctagaaataaaactgctaatttcttatggtaaactattttcctttagattgcacaatcgaactcgaaaatctagtggagactatgtgactatgtttatatatatgaaacctaaatcaaattatcccaataattgggagacacaaaagaaaaattacgaaagaaaacaggaaatcaaatcaaaagataaagagaaggtaaaaaaaggcaagaagcactaatgtttaatatttatagttttctccattaaagaaaaagcgatgatgtgtgttctcatcttttgtgaaagtatatatattgcttttgcttttctcaaaagcaaaagactcatccaacaagaacaaaaaaaaaaactaaagctcaatccaaaagacgaagaatgcattggatactacaacttctttttcacttttctttcaaatttacaattatgattttcacaatacagtttattcaaaaataaataaaaaaacgaggcatgaaaataatgattatcctcttcacttattaagccactcactataagcagagcaactccagaacatagtgagcccccaaaacattaaagcatgatgatgtctaatgatgatgatcttcttcgttccatttctctaaatttttgggatttctgcgaagacccttcttctctttctcttctctgaacttcaagattcgtgtcggacaaatttttgtttttatttttctgatgttaca

SEQ ID NO: 91 - DNA, 3000 bp, Arabidopsis thaliana
  misc_feature (1)..(3000): Ceres Promoter PR0924
atctataacgagttaacatgttgccagtttgaatcaagaagcttggatgatgaatgaatggatcggtttgtggtacaattcttaaaattgtagtagaggagacagagaaaaaacatgataagactttggtatttacaacttgacggagacaagacagtaagccaaatctgtcacaaaaacactcaaactcttttctcagtgttttgagtttaaagagagacttattcacttcccctttcgtaacacttatttgtctcccaaccaaacagtttctgtcctttcccttgtcctcccacgtgcatctttatatctcatgacttttcgtttctagatcttgaataatgtcttagtggattaggtttgttgtcggtaaattaggtgaccgtttttttcttatatttggaagatcgcgggatgaagcagatactgagtttcagggcatacacacctaatttgaaaatcattgttagtccaatttcactttaatcttgtttacaaaaaaattgatctgaaaatgttgatgggataagtaaaaatgtaagttttgctagtagtcatgatataataatagcaaaaccagatcaattttgagcaaaaggaagaaacaaaaaacagatcgatcccacgagcaagactaagtgtaaagtggttcccacaagagccatatggatatggtccttcaacttttaaagcccattacttcagtggtcgacccgacattacgccacgagtagtcacgcacgcacgactccgttcacgtgacattcacgttgatatttccccctctactctcttctgcttggttgatctaaaaaacatgaagagaccaacctaatttcatattaatatatgatatagacttcatactcaacagtcactttcgtaatccaaatccatatcttacgaaattagttcttaataaaggttgtggattaagttataatattgtgttaagagttaagacacagcatataaccttgtaccaacagtgctttattcttaaatggaaacaaaacatatgtcaatgtcaagcatacagctaaaatatcattatctaatattaagagtaaaacaagataattaaaaattgaaacaacaccatatttttatagctttacttatcgtatttttctagtcttcatggtaattgtgttgctttattttgtttataaatgaatttggttcgaccagatagtctaatatcagtttttaaacactggttttaataaaatcatatgtcggcaattcaacctgttacgttgtatgattgtatcctagtcaaataggggaggaggtactagtcgtttcaattagtttacgtaatcaatccaaagaaactataagctataaagatcctcaatttgttggttacaataaaaacaacagttgtcaaaatttatgtttataaaaagtaataactatgttccttcccatatagagcaaagtacctcaggataggcaaaccgtacttaatagcccttattcataatttgatccaactcttccccacaaaattgcaactgatgaagtcaatacttgtatagtgagtcaagctataaatgtctagtgatagttttgtctcttaaaaggttaacaaaagttatgacaagctgaaaaatcagagtttgctaggagtattacttacagttatcagtttaagtatcacatttatagtattgtatacaatgattcttaaattccaccttttccgtgcgaaaccaaattttctattggaaacatagaatgtaaacaaaaatatgggacgttgtccgttccaacattaaccaaacttgtctattactaatattcgtgttggtttgatgttggatgtctaaattcgttgaatcatgtgtctcttgacgaaatatgcatcttcttatttcttagtatagatgcactttatcattcttttagtacatgcttaatttttttttttaaaatatgttgattgtcatattgccaaaagtatgaattaaagacgcacatctaacacaagttagcagccgtaaatccttccataaatttattttgcaagttttgctcattatataatgagcggaatttatgatataatcgtttgtaataatgttatgttttgatcaaaatttgaaattaaaagtaggtgagaacttgttatacagtgtagataaggtggatcttgaatataaaaataaaatttataagatgtatttaaagcagaaaagcataaaactttagataaaataatgtaaaaatgtgttagcatcaatgttgggatattggccgacccgaacttaatcaatgtcggaagccattacttctctcccaaaagacctttttccttcggagaactaggaacttcctcactacctttcgcttaacgtgaaagccataaatttcatatattcataaaaatcagaaaatctaaaactgtttagtatcacctgtttttggtatagactattggttttgtgttacttcctaaactatatgatttcgtacttcattggatcttatagagatgaatattcgtaaaaagataagttatctggtgaaacgttacttcagtcatgttgggtctagatttacatactactatgaaacattttaagataataattatcctagccaactatatgttctatattatgggccaagaagatatagaactaaaagttcagaatttaacgatataaattactagtatattctaatacttgaatgattactgttttagttgtttagaataaatagtagcgtgttggttaagataccatctatccacatctatatttgtgtgggttacataaaatgtacataatattatatacatatatatgtatatttttgataaagccatatattactccttgacctctgcccccatttccttttactataaataggaatactcatgatcctctaattcagcaatcaacaccaacgaacacaaccttttccaaagccaataataaaagaacaaaagcttttagtttcatcaaagacgaagctgccttagaa

SEQ ID NO: 92 - DNA, 1000 bp, Arabidopsis thaliana
  misc_feature (1)..(1000): Ceres Promoter YP0388
agaagtattcacgcaccaaggttatatttgtagtgacatattctacaattatcacatttttctcttatgtttcgtagtcgcagatggtcaattttttctataataatttgtccttgaacacaccaaactttagaaacgatgatatataccgtattgtcacgctcacaatgaaacaaacgcgatgaatcgtcatcaccagctaaaagcctaaaacaccatcttagttttcactcagataaaaagattatttgtttccaacctttctattgaattgattagcagtgatgacgtaattagtgatagtttatagtaaaacaaatggaagtggtaataaatttacacaacaaaatatggtaagaatctataaaataagaggttaagagatctcatgttatattaaatgattgaaagaaaaacaaactattggttgatttccatatgtaatagtaagttgtgatgaaagtgatgacgtaattagttgtatttatagtaaaacaaattaaaatggtaaggtaaatttccacaacaaaacttggtaaaaatcttaaaaaaaaaaaaagaggtttagagatcgcatgcgtgtcatcaaaggttctttttcactttaggtctgagtagtgttagactttgattggtgcacgtaagtgtttcgtatcgcgatttaggagaagtacgttttacacgtggacacaatcaacggtcaagatttcgtcgtccagatagaggagcgatacgtcacgccattcaacaatctcctcttcttcattccttcattttgattttgagttttgatctgcccgttcaaaagtctcggtcatctgcccgtaaatataaagatgattatatttatttatatcttctggtgaaagaagctaatataaagcttccatggctaatcttgtttaagcttctcttcttcttctctctcctgtgtctcgttcactagttttttttcgggggagagtgatggagtgtgtttgttgaatagttttgacgatca

SEQ ID NO: 93 - DNA, 283 bp, Arabidopsis thaliana
  misc_feature (1)..(283): Ceres Promoter PD0901
caaagtatttgacaagccatatggttttggatcaaaaagtcggtccaaaattaatgttttatgtgcaagaaccgacccattgtacacacgtgttaacatcttcaagactttcatctctatttttcttttggtcattaagatacccattgatccgaatctgttacattcccacctacttttttaatttttactatccactccaaattaaacacaaccgatgattttaataattggaagctttttaaaatatttctccacgtgcctctttgtgtttgtctatata

SEQ ID NO: 94 - DNA, 1000 bp, Arabidopsis thaliana
  misc_feature (1)..(1000): Ceres Promoter PT0623
aaagttattgacattttgaaaggaccgtaaatattaccaaaaaactgacggagttaggatcggccacgtagaaagggacaaagagagaacagtcacggactcggccagactaagtatgggcctgtctgaatccaaactcagctaagttccaaaagcataaagagagatgtgtaatgaaatgaacgtattctagaaacgaaagcaatgttatgctttgtttttgagccacatgtttttgggagatggagagaatcttttttacgtttttaacctaacccacttggcacttggccaaaaaagtgagaagaaactgtggcgaatgagtaggccacgccatggactttgttccttgtccttcaaaagttaaatttatgttatgcgtggggacaatctaagcaacgtggttcctttaaatatcgcagcttcctcttttacacttttggagcctacgtgttttgttttggaccggccaaatacacgagtcagtcagtttagaaataatttggatgtccaaaaatcttggagatccaaataaaataattagcatgttttagttcataagaatatgaaatgtagataaactgtctatattaatttttccatagaattggctttttatcgaggtgatgtacttaatgactttgttgattactactcgtataacaataaagaatatgatactatgtgagacttataatgaatttggtgtgtgttaattaatccagttgaaacagtttaataacaaatcagaataaaaattgtagtaagaaaatttgaacgctgatccttcaacctagatagtgaacctttcaaatactatatgattcacgtgtaatgtttttgaccgttggttatttttgtgtgaactatattaacttatcaatatcgaaaggctaaataagtaaataactaaaagaaagttcaggaaacaactcgacctaatgacctatcatttctgatcacccgtcctataaatacatacgtaagatcattcgttact

SEQ ID NO: 95 - DNA, 1756 bp, Arabidopsis thaliana
  misc_feature (1)..(1756): Ceres ANNOT ID no. 826303
  misc_feature (1)..(1756): Ceres SEED LINE ME11370
  misc_feature (1)..(1756): Ceres GEMINI ID 5060D8
  misc_feature: Encodes the peptide sequence given in SEQ ID NO. 96
atgcatgctctcaaggacaaagtctcacaaaaactctctaatctcttcgccgattctccaagccaatctgcttctcctcgttattccaactccgattctccaaaggtatgatattttcttatcagaaaccctaattgttgttttccttagatgggtctggatttgaatctcgtttggttgatttgtgtaggctaggttgaattcaagtgtaggcaaatcattgtcttcgtatttctcatttgttgttcctcaatctgggaacgaggaggattctgagttatgtccacctctacccattagaacagagagctatgagtgtattgagaattgcaaatctgctaatgggcaagctaaagctggaacctttatctcaattggtgaagataaggattgtgagttacgtgtttctgcgaaagtagaagaaagtggtaatgattactttgatggggtgaagaagatgagggaattaacagagagctctgtgtttattactgctaacttgtttgaattcttgcatgcgagtcttcctaatattgtaagaggatgcaaatggatcttgttgtataggtaaggaagtttgttttcgtatcttgtttggaggttttggaattgtggtttttggtgttaacttttttatcggatgaagggcagtacgttgaaacatggtatatcacttcgtacgcttttgcgaagaagtggagagcttcctggtccttgtttactggtttgtttgcttacctctatgctctttgaatggggtagatcttagtttgtgatgatttggtgtggtgcaggttgctggagacaaacaaggtgcagtgtttggagctctgttggaatgtccactgcaacctactcctaagaggaaatatcaggcaggctagctaattgtattagtgtttgtctgtggagattgattagtttccttattactgattctctttaggtgtttttgatgatagggtacaagccagacattcttgttcacaactatttatggtgaaccacgcatatttagacctaccggtaatcatttgaaccccttcttttattatttacttctcaagaaatcgcgtatagttagctaatggatttatgggaggaagagtatagagaaaattgaagagaattcttaagtctcttcaaaatcagatcttaagaataagaacatttggttgcagctggtttttatcctaatccttcttggttcttgttatcaagacttgatccacacttgttttagttagttgtattgttgatataaaccatctagtgaaagaagagtaacttgtttaggagaagttgacatccactcaagtatgtgtacttaactcaggtacctctctcatgaatttgtgcgcaggtgccaaccgatattacctgatgtgtatgaatgaatttttggcgtttggaggtggaggaaactttgcactatgtttagacgaagatttgtaaggcacaatttggctcaatctcatttagaaaatttcccattttaatcgttttgatgatactcaaaccaaactttgctacatgaactaggttgaaggcaacaagtggaccttctgaaacatttgggaacgaatgtttggctagcagcacggagtttgagttaaagaatgtcgaggtatcgctatatacatatatttagtttgtgctactatcttacttgggtcttggaagtaatcagtgaaagttcatggtgttaaatctgcagctctggggatttgcacatgcgtctcaatacctctcgtaa

SEQ ID NO: 96 - protein, 303 aa, Arabidopsis thaliana
  misc_feature (1)..(303): Ceres ANNOT ID no. 826303
  misc_feature (1)..(303): LOCUS ID no. At2g05590
  misc_feature (1)..(303): Ceres SEED LINE ME11370
  misc_feature (1)..(303): Ceres GEMINI ID 5060D8
  misc_feature (158)..(296): Pfam Name: TLD Pfam Description: TLD
  misc_feature: Bit score of 844.4 for HMM based on sequences of FIGURE 1.
MHALKDKVSQKLSNLFADSPSQSASPRYSNSDSPKARLNSSVGKSLSSYFSFVVPQSGNEEDSELCPPLPIRTESYECIENCKSANGQAKAGTFISIGEDKDCELRVSAKVEESGNDYFDGVKKMRELTESSVFITANLFEFLHASLPNIVRGCKWILLYSTLKHGISLRTLLRRSGELPGPCLLVAGDKQGAVFGALLECPLQPTPKRKYQGTSQTFLFTTIYGEPRIFRPTGANRYYLMCMNEFLAFGGGGNFALCLDEDLLKATSGPSETFGNECLASSTEFELKNVELWGFAHASQYLS

SEQ ID NO: 97 - protein, 317 aa, Glycine max
  misc_feature (1)..(317): Ceres CLONE ID no. 1103899
  misc_feature (1)..(317): Functional Homolog of  Ceres ANNOT ID no. 826303 at SEQ ID NO. 96
  misc_feature (172)..(310): Pfam Name: TLD Pfam Description: TLD
  misc_feature: Bit score of 889.1 for HMM based on sequences of FIGURE 1.
MHSFKDKVTQKLSHLFPNSFSSSSSSPQDSPYSQEDKPLSSYLSYIIPSVSFDGSKTNKNQHELKPIQSTSAGYNYENFEYQDVPSDNYVDCTNMDLLKDDNDNINEDPISRRTSSSSSSEVFEEANEQQTPNTSKKSRLNLTDDSTFISPELYEFLEICLPNIVKGRQWVLLYSTLKHGVSLRTLIRKSAELSCPGLLIAGDMQGAVFGGLLDCPLKPTAKRKYQGTNQTFVFTTIYGQPRLFLPTGVNRYYYMCLNGLLALGGGGNYALCLEEDLLTGTSGPSDTFGNKCLAHSPEFELKNVELWGFAHPSPFQG

SEQ ID NO: 98 - protein, 327 aa, Zea mays
  misc_feature (1)..(327): Ceres CLONE ID no. 463034
  misc_feature (1)..(327): Functional Homolog of  Ceres ANNOT ID no. 826303 at SEQ ID NO. 96
  misc_feature (182)..(320): Pfam Name: TLD Pfam Description: TLD
  misc_feature: Bit score of 933.4 for HMM based on sequences of FIGURE 1.
MLAWKEKVADRLARLLADSPVSPSPAQAAVEPSQAKSFPPEHFTPPKTSSLSSYVFSLLPTSNTGHEQNSPCSETLRPLPPESLPKKWRWSDVTWKDPPVELSEESGSESDRDERNGNFGNDPVLQSYRPINNSNGNEETSTSDCVGTLRYLTEKSMFVSPKLFAFFQSSLPGTLKGCHWVLLYSTWKHGISLRTLLRRSENIQGPCLLIVGDMQGAVFGGLLNSPLRPTEKRKYQGTNQTFVFTTIHGEPRLFRPTGANRFYYLCLNNALAFGGGGSFALCVDEDLLHGSSGSCETFGNSCLAYSPEFELKNVELWGFTHSWSRST

SEQ ID NO: 99 - DNA, 1248 bp, Panicum virgatum
  misc_feature (1)..(1248): Ceres CLONE ID no.1816436
  misc_feature: Encodes the peptide sequence given in SEQ ID NO. 100
cctttttgcctcgtcctcccgccgccgcttagctcgcgcggtcgcttgtcgccgccctccatccacgagctctcgcgggcaggtgggcgggcgtgaggcgaggcgatgctcgcgtggaaggagaaggtggcggaacgcctttcccgcctcatcgccgactcccccgtctccccttccccgggccccgccgccgtccagccgccgctggcaacatctctcccaacagaacattttacttcccccaataagtcatccttatcttcttatgtattgtcccttctaccaacctcaaactcagggcctgagcagaattcaccttgttcagggactttgagaccattacctcctgagtcacttcctaagagatggagagggagtgaattcacatggcaagatctgccgcaggaattgagtgaggagtctggttctgaaagtgagagagatgaaaggaatggggattttagtaagaaccaggtccatcagtcatacagatccgtgggaaactcgaatggaaatgaggaaacatcgacttcagactgtgcaggcgctcttcattatctaactgaaaagtctatgtttgtatctccaaaactgtttgccttctttgattcttctctccctgggaccttaaaggggtgccactgggtattgctatatagcacctggaagcatgggatatctctaagaacacttcttcgtagaactgagaatattcagggtccatgcctattgattgttggagatatgaaaggggctgtgtttggtggcttattgaacagtcctttgcggcctacagagaaaaggaaataccagggaacaaaccagacatttgtgttcacaacgatacatggtgaacctagacttttcagaccaactggtgcaaacagattctactatttgtgcttgaatgatgctttggcatttggaggtggtggaagcttcgcattgtgtgttgatgaagatttgttacatggaagcagtggatcatgcgatacatttggaaactcatgcttggcatatactccagagtttgaactaaagaatgttgagctgtgggggttcacgcattcgtggagccgttcgaagtagctgatgctgctagttgtccccatacggccctcagctgtggtcgatccagtgtatacttgtctacaaaaaaagaaaaagaaagaacgagacagtttacttgtttagctgatgctagttgcccccacacgaccgtcagctgtggttaaaccagtctactat

SEQ ID NO: 100 - protein, 327 aa, Panicum virgatum
  misc_feature (1)..(327): Ceres CLONE ID no. 1816436
  misc_feature (1)..(327): Functional Homolog of  Ceres ANNOT ID no. 826303 at SEQ ID NO. 96
  misc_feature (182)..(320): Pfam Name: TLD Pfam Description: TLD
  misc_feature: Bit score of 921.0 for HMM based on sequences of FIGURE 1.
MLAWKEKVAERLSRLIADSPVSPSPGPAAVQPPLATSLPTEHFTSPNKSSLSSYVLSLLPTSNSGPEQNSPCSGTLRPLPPESLPKRWRGSEFTWQDLPQELSEESGSESERDERNGDFSKNQVHQSYRSVGNSNGNEETSTSDCAGALHYLTEKSMFVSPKLFAFFDSSLPGTLKGCHWVLLYSTWKHGISLRTLLRRTENIQGPCLLIVGDMKGAVFGGLLNSPLRPTEKRKYQGTNQTFVFTTIHGEPRLFRPTGANRFYYLCLNDALAFGGGGSFALCVDEDLLHGSSGSCDTFGNSCLAYTPEFELKNVELWGFTHSWSRSK

SEQ ID NO: 101 - DNA, 1950 bp, Arabidopsis thaliana
  misc_feature (1)..(1950): Ceres ANNOT ID no. 571199
  misc_feature (1)..(1950): Ceres SEED LINE ME11409
  misc_feature (1)..(1950): Ceres GEMINI ID 5061G10
  misc_feature: Encodes the peptide sequence given in SEQ ID NO. 102
atggtgaattcgtacgttcctcttcgtttcaccattttcatctccttctccatcgcagcagcttcatccttcaaactccactccgcttctcattctccgtcgtcatttccgaaagccaccggcgacgatctactctccgttctcggacctccctccgccgcgtcgtgcctcaacccaatcgtctctcgagagatcaaatcgtgtcttaaattcctcgtcccattcaaatcggataaacctaaacccgaatttggacgatgctcgcctcgtactggactctgttccggaaaaattgacgccgttgagagacggagcaagtttgaagaggagaattctctaatctggtggccaccggaatcggttctagagcttgctcgtctcgctgttgactccggtggtgatcccggttcaattcagcgaactctcaatccgaaaatgatcccggttcgtcttcaatttaatggtttgatttggtttattgttcgttagattgaattggttaaaatttggttttataggttcctgatgttgaacgatcaagaaaagataaatgtcaacttactagaactccttatggtcgtcattttatagcagaggtaaaaaaagaagctattttgtgaactgtttgatcttatggtgtagtgatctgattgatgatgttaatgaacaggaagtgaactcatatttcgagttcttgtttcatctaattgaatctaggggacctagtgttggattgaatgtttcattgagtagatatgatttgttccatggccatttattccttgcctcagaatctggacgccttggaatattgtaagtctcctttgtctcctcaacacacactaggactcttgaaatagtaatgatgatcatgttctgttactgacttcgttgtgtaagaatcgagacgctttgataggcactagaatagtagatataagggggtctagaccatttggttaattgggagcatttaggctttgagagtgaagagaactctctagggtttgttcttgtgttcttgaatgtaaccaacagttatcaataaaggaagaatggtttctgattcttaacacaattgttgcagtgtttttagaaaggttgaacgtaagtaatgagttttggggaatatttatagaaagttacatggttgagctaggttttgagtactgttgttgactagtatctgattggtgatggtaggtttcatgctaaagagtatccagcctatgacaagaaagtgtttccttacaacatgggatattgccagagaggtaatatgggttcttgtccgtgtgactgtgagttttcttgcaatctcttgaaacatagaaatggtcacagaaatcccttaaatcttcagtattatgattgtatctcctttttgttaggatctgacgtgaaatacaatgattcaatgaacttgaggaatatcctttggcttgcaccattacctagcaactcttctccagattgggttgctccaggtataatatctgttttcatctctgagagtaatagaaaagatctaaacacttcatagtttcaagatgatcttgtctttcattagtatcgtggaaaacaattgtagtgttacgtttgacatcttcctttcctttgattgatctgtaggtgtacttgtggttcttgatgcgcatccggatggaatcatataccgagatctcatccctgactatgttaagtttgtaagaacaatatacgaaggtttgaacaactctataccttctctcatctcactcatcaatttgcttcattgtagatcacatttgattacacatacatacactcaaagtctcttaaagatttatgctctattgaaactttatgtcttatccttctccaccagatgatttgggaacaaccgcagttgatgtcaattacttgaatgtcggagctcacgaacctgactatcagcttttcatgtgctga

SEQ ID NO: 102 - protein, 335 aa, Arabidopsis thaliana
  misc_feature (1)..(335): Ceres ANNOT ID no. 571199
  misc_feature (1)..(335): LOCUS ID no. At5g27710
  misc_feature (1)..(335): Ceres SEED LINE ME11409
  misc_feature (1)..(335): Ceres GEMINI ID 5061G10
  misc_feature: Bit score of 877.4 for HMM based on sequences of FIGURE 2.
MVNSYVPLRFTIFISFSIAAASSFKLHSASHSPSSFPKATGDDLLSVLGPPSAASCLNPIVSREIKSCLKFLVPFKSDKPKPEFGRCSPRTGLCSGKIDAVERRSKFEEENSLIWWPPESVLELARLAVDSGGDPGSIQRTLNPKMIPVPDVERSRKDKCQLTRTPYGRHFIAEEVNSYFEFLFHLIESRGPSVGLNVSLSRYDLFHGHLFLASESGRLGILFHAKEYPAYDKKVFPYNMGYCQRGSDVKYNDSMNLRNILWLAPLPSNSSPDWVAPGVLVVLDAHPDGIIYRDLIPDYVKFVRTIYEDDLGTTAVDVNYLNVGAHEPDYQLFMC

SEQ ID NO: 103 - protein, 335 aa, Arabidopsis thaliana
  misc_feature (1)..(335): Public GI no. 110737799
  misc_feature (1)..(335): Functional Homolog of  Ceres ANNOT ID no. 571199 at SEQ ID NO. 102
  misc_feature: Bit score of 875.5 for HMM based on sequences of FIGURE 2.
MVNSYVPLHFTIFISFSIAAASSFKLHSASHSPSSFPKATGDDLLSVLGPPSAASCLNPIVSREIKSCLKFLVPFKSDKPKPEFGRCSPRTGLCSGKIDAVERRSKFEEENSLIWWPPESVLELARLAVDSGGDPGSIQRTLNPKMIPVPDVERSRKDKCQLTRTPYGRHFIAEEVNSYFEFLFHLIESRGPSVGLNVSLSRYDLFHGHLFLASESGRLGILFHAKEYPAYDKKVFPYNMGYCQRGSDVKYNDSMNLRNILWLAPLPSNSSPDWVAPGVLVVLDAHPDGIIYRDLIPDYVKFVRTIYEDDLGTTAVDVNYLNVGAHEPDYQLFMC

SEQ ID NO: 104 - DNA, 3168 bp, Populus balsamifera subsp. trichocarpa
  misc_feature (1)..(3168): Ceres ANNOT ID no.1469254
  misc_feature (1)..(3168): Genomic Sequence
  misc_feature: Encodes the peptide sequence given in SEQ ID NO. 106
atgggcagcccctctttctgctctttcagatttgcaattttcctctccctctccctcacagcttcatcatcatctccctccctcctcccattcaaatcaccatcaccatcatcaatcccaaaagccacaccatctgatctactctccctcttgggccctccaacccaatcctccaaaatcaaccccttaatctctcaacaactctcttcttgccttaaatttcttgttcccttcactccttcaaaaccaaaaacatcaaaatacaacagtatcagcgactgttatattaagcaaaggagtctcagactccgttctaatagcgtgattagcgttgagagaagcaagagtgaagagaatgaactcatttggtggccacctgaacctgtccttgaactggctcggcttgcgcttgattctggtggagacccagcttcaatacaccgagctctggatcctactgtcttgcctgtgagttttagcttttatttttttacgagtgaatcatttttattagtaataatcgatcatttcgcacaaaagttaatttccagttaagctagtgaaaacccatgatttactatagcatgaattggtagttgaagaatatcttttgatcaatcgtagtagataggaagaaattgttggaaatgaaggtggcagagtgcagtaatttaggtgaactgaaatattgctattgtctagaaaaaaaacaaattctatgataattgatattattataggtgcctgatgttgaaggatgccaagagaacaaatgtgggcttactagaacaccatatggaagaaggttcataagtgaggtttgtatcattcttagaagggtttttttttttttttttttttaatttagcttctatgttaatcactaccattttgttgttaaatcgcaggagttgaattcttatattaaatttttgtttgagctcattgttgctcgaggaccgtcagttgggtttaatgtatctttgaatcgatatgatttgtttcatggtcatgttttcattgccagggaaactggaagacttgggatattgtaagttttgcgtttcactgtccaatgattatgtgcagtacagatgcaaattgaattttatgtgaaatggtatgtgtgcggcaaatagtctgcatttgtgcctttaaggactgcattttcacaattagacatcaaaaacatatctgaaaggttgaatttcacaaaaagaatggtgaaaatgtaataacaaattgaactcattcacaatctggaaggcatgaactagtgttactatggttgtagtatgtggatatgcacctatatgtgaattgcttggcaaccaggaccaaattcgaatatgttagtgtgaatatgacctgtattcaatggatgggcaggatatcctgtacaaaagaggtttttagttcaaaacccaatctgctttgaggtatcggtcctctgcttacattgtagtatctccagtcagtttcacatattatgaccgcgtctgttgttgtctcatttcatagggttaaatgagagagttcattgttctattcaagaaagtctctccttgaagcatgaatgtttttattaaatttgtaatggttgttacatggttttgattatgatcttgatggaatttagctcgttaattttctgcatgttattgacaaattcttacttattttgcaggttccatgctagagagtaccccgcatatgataaagaagtatttccatacaatatgggatattgccagaaaggtaaatcagcaaaactcgtatgaacacaacttcagtttctgttaccaacacttgtaacaattttcattctttcatccctaaatctgcaaaattgcatctgttatgaaggtctgaattaaggattagttttttttttaaaaaaaaaaatcatttacattttttttgaaaggaaactagaacagaatctgttattatttcatataaactttgtaaatgcttaaagtaattctattgaactgttggaattgatctgaaatcatgaaatcatatcactaagaaaacatgtggctgttgtactaataccaacttctttccccctttcaggttctactgtaacttacgatgattctatgaatttgcgaaacattctcgtgttgcttccaatgccaagcaattccactaaagcttgggtggcaccaggtacatttctcaagttgccattactgtagtattgcaacagtcagagttctgcttctggatggataaactttgtaggttaaacagtaatcccacatctcatgaaccctgtaatttctcatccctgtagcattttcattatgattgaaaccaccaatatgcaaagccactcagagttgaatttatgcatctaaaaaggatacttggatgtgaagctgtatgcatctcctttcttcttcttgttttatttttaattgttctctaaaagtttcttgtgtctcctttactttgagctctatagtgttggcctttctctctcttaaattctaatttgtttgtggtacaagagaagtagacatgtcttatggttaccagagttagctgtgttcaaaatactcagaagggaagggtagactagtgaatgacacagaagtcattcctcttaagtcttgtgcagtcttaacagaaataatgcatggaatgtatattgccggaacttgttccgtgatctttattccttgaagattacatgacgctatttgattttcttggcttttatcaaacacgaagtgtcttagagtgctgtaagccacatctattcttgtgtctttcctaaagtgaaagttcctttgtttccagcaactattcagcaaaatgttcctagaaatcaatatggattcaggtctcaattctcgtgtcttaatttagcttgctattgacatgcaggagtcctagtcgtgctggatgcccgtcctgatggaatcatatacagagatctcatacctgaatatgtaaacgttgcaaggaccatatatgaaggtttgagcttcatttaccttgtatctttccgcttgcaaaattcaaatttcaattcatcatgttgcttgacatctattgttggtcttggcagatgatttgggagaagttgtggttgatgtcaactacttgaatgttggagacacagttcctgattatcagatcttcgtatgctga

SEQ ID NO: 105 - DNA, 1032 bp, Populus balsamifera subsp. trichocarpa
  misc_feature (1)..(1032): Ceres ANNOT ID no.1469254
  misc_feature: Encodes the peptide sequence given in SEQ ID NO. 106
atgggcagcccctctttctgctctttcagatttgcaattttcctctccctctccctcacagcttcatcatcatctccctccctcctcccattcaaatcaccatcaccatcatcaatcccaaaagccacaccatctgatctactctccctcttgggccctccaacccaatcctccaaaatcaaccccttaatctctcaacaactctcttcttgccttaaatttcttgttcccttcactccttcaaaaccaaaaacatcaaaatacaacagtatcagcgactgttatattaagcaaaggagtctcagactccgttctaatagcgtgattagcgttgagagaagcaagagtgaagagaatgaactcatttggtggccacctgaacctgtccttgaactggctcggcttgcgcttgattctggtggagacccagcttcaatacaccgagctctggatcctactgtcttgcctgtgcctgatgttgaaggatgccaagagaacaaatgtgggcttactagaacaccatatggaagaaggttcataagtgaggagttgaattcttatattaaatttttgtttgagctcattgttgctcgaggaccgtcagttgggtttaatgtatctttgaatcgatatgatttgtttcatggtcatgttttcattgccagggaaactggaagacttgggatattgttccatgctagagagtaccccgcatatgataaagaagtatttccatacaatatgggatattgccagaaaggttctactgtaacttacgatgattctatgaatttgcgaaacattctcgtgttgcttccaatgccaagcaattccactaaagcttgggtggcaccaggagtcctagtcgtgctggatgcccgtcctgatggaatcatatacagagatctcatacctgaatatgtaaacgttgcaaggaccatatatgaagatgatttgggagaagttgtggttgatgtcaactacttgaatgttggagacacagttcctgattatcagatcttcgtatgctga

SEQ ID NO: 106 - protein, 343 aa, Populus balsamifera subsp. trichocarpa
  misc_feature (1)..(343): Ceres ANNOT ID no. 1469254
  misc_feature (1)..(343): Functional Homolog of  Ceres ANNOT ID no. 571199 at SEQ ID NO. 102
  misc_feature: Bit score of 896.0 for HMM based on sequences of FIGURE 2.
MGSPSFCSFRFAIFLSLSLTASSSSPSLLPFKSPSPSSIPKATPSDLLSLLGPPTQSSKINPLISQQLSSCLKFLVPFTPSKPKTSKYNSISDCYIKQRSLRLRSNSVISVERSKSEENELIWWPPEPVLELARLALDSGGDPASIHRALDPTVLPVPDVEGCQENKCGLTRTPYGRRFISEELNSYIKFLFELIVARGPSVGFNVSLNRYDLFHGHVFIARETGRLGILFHAREYPAYDKEVFPYNMGYCQKGSTVTYDDSMNLRNILVLLPMPSNSTKAWVAPGVLVVLDARPDGIIYRDLIPEYVNVARTIYEDDLGEVVVDVNYLNVGDTVPDYQIFVC

SEQ ID NO: 107 - protein, 331 aa, Medicago truncatula
  misc_feature (1)..(331): Public GI no. 92895842
  misc_feature (1)..(331): Functional Homolog of  Ceres ANNOT ID no. 571199 at SEQ ID NO. 102
  misc_feature: Bit score of 871.4 for HMM based on sequences of FIGURE 2.
MRYPSVFGLALFLSFSVTSSSSSFPRTPFFRLPSSSIISIPKATPSDLLSLLGPTPHSKLVNPVVARQLKSCLKFLVPFSPTVTDSPPRHRKLGRSELTGSNRRNDNDMIWWPPEPVLELARLAVDSSGDPAAVHRALDPTVIPVPDVEGSNEDRCHLTRTPYGRRFISEELNMYMQFLFELIVDRGPSIGFDVALNRYDLFHGHLFLSIHSGRLGVLFHAREYPAYDKKVFPYNMGFCQRGSNVTYDDSMNLRNILWLAPLPDNSTKSWVAPGVLVVLDARPDGIIYRDLIPDYVKIARTIYEDDLGEVAVDVNILNVGSQSQNYQIFIC

SEQ ID NO: 108 - protein, 330 aa, Glycine max
  misc_feature (1)..(330): Ceres CLONE ID no. 1121764
  misc_feature (1)..(330): Functional Homolog of  Ceres ANNOT ID no. 571199 at SEQ ID NO. 102
  misc_feature: Bit score of 870.7 for HMM based on sequences of FIGURE 2.
MSHPSVSFRLALFLSFSLTASSSLPPLPVFSKRYAPSSSLIPKATPSDLLSLLGSKPQSSAVNPEVARDLKSCFKFLVPFSPVHPRHRKLGLGRPKLTSPTRRDKNKLIWWPPEPVLELARLAVDSGGDPAAIHRLLDPTIIQVPDCEGSKDERCELTRTPYGRRFICEELNLYLQFLFELIVDRGPSVGLDVTLNRFDLFHGHLFLALDSGRLGILFHAKEYPAYDKQVFPYNMGFCQRGSNVTYDDSMNLRNILWLAPMPGDSGESWVAPGVLVVLDARPDGIIYRDLIPDYVNFARTIYEDDLGDVAVDVNYLNVGSETRNYQIFIC

SEQ ID NO: 109 - protein, 295 aa, Oryza sativa subsp. japonica
  misc_feature (1)..(295): Public GI no. 33146851
  misc_feature (1)..(295): Functional Homolog of  Ceres ANNOT ID no. 571199 at SEQ ID NO. 102
  misc_feature: Bit score of 747.6 for HMM based on sequences of FIGURE 2.
MFQSFSVSPILSLKLAFAVAFAVSFSVSCCRLRACLRFLSPVLPLPAAAAISEGRAARKVLVERGGADEADGMVMWPPAPVMELARLAVDSGGDPGAIHRALDPTMLPVPDVQRAKRNKCQLTRTPYGRRFANKDINSYLAFLFELIAARGPSVGLNVSLSRYDFFHGHLFLASGTGRLGILFHAKEYPAFDKELFPYSLGFCQAGSNVVYDDSMNLRNILWLAPLPSNETKAWLSPGVLVVLDAHPDGIIYQDMIRDYVRDVRTIYEDDFGEVSVDVNYLNVANSAPANRVFIC

SEQ ID NO: 110 - protein, 337 aa, Zea mays
  misc_feature (1)..(337): Ceres CLONE ID no. 278526
  misc_feature (1)..(337): Functional Homolog of  Ceres ANNOT ID no. 571199 at SEQ ID NO. 102
  misc_feature: Bit score of 861.0 for HMM based on sequences of FIGURE 2.
MLRLRFRPAPLSLKLAFTVSLAVSFSVSCCASSSYSSRTSSRSPQAVAADLLSVLAGPRAAARVPAAEASRLRACLRFLAPANPTAQKVSSWSRGGPRKFLLDGCDAGAAEADEMVMWPPAPVLDLARLAVDSGGDPGAIHRALDPTMLPVPDVEGSQKNKCHLTRTPYGRRFANEEINSYFAFLFELIVARAPSVGLNVSLNRYDLFHGHLFLASETGRLGILFHAKEYPAFNKELFPYNLGYCQAGSNVPYDDSMNLRNVLWLAPLPSKETKAWLAPGVLVVLDAHPDGIIYQEMIRDYVQIVRTVYEDDLGENTVDVNYLNVANAAPVDRIYIC

SEQ ID NO: 111 - DNA, 1953 bp, Arabidopsis thaliana
  misc_feature (1)..(1953): Ceres ANNOT ID no. 842015
  misc_feature (1)..(1953): Ceres SEED LINE ME11410
  misc_feature (1)..(1953): Ceres GEMINI ID 5061H10
  misc_feature: Encodes the peptide sequence given in SEQ ID NO. 112
atgcagatgaccaggtaaaagggtctttgagaatttagagaagtaaagtgttatgttgagatgttcatgaaatgttgtctgaagttggatgcaggctgagttattcattctcaggttatctcgtagtagcggtgtacttggtcttgcgggtacagcttttgcttccgagattttctccagaaatctgcagttagatgcaaaacatatgaagaaccaatctattcgcttagtgcgtccgctactagatttatggaaagaagacatgtacaaggttctcttaaaactagaaactcaagaatttatcgttttatggtttgttgacatcaactcttatcttatttcctagcagatatgtcaatggggtagacaagattgggttgaagatccaactaatcgtagtcagttgtttgttcggaataggattcgaacatcaataggaaatctagaatcaggcaagtctatcaaacatcaaaccaaacttgttctctaaatcttgatgactaatataagttattgttttccttttcaggtagcttcaagtcagagctgcaagcagtcatttctgaatgcaggagaacacgttcatttgttgataaagtttgtacagacttaatacatcagaccgtaacagtgacagatgtaagagcattttccagtttaagcacatatgtataaactgtttctggatcgggtaagtgtgaaaattcatctctgttttgatgttggaattagcagaaagggtatgctattcttgatctagagagacttaatccttcaggagttaaagacatttgcctctcaaagtatctctttgcggtcctgcaggtgttacatcttgagtttttttctttggtaaagttactgccctttgagtgttttcttgactattctttgctctcgaatctgcagtttatctctcaacggcaaagaccaatcagaggaaacacttcaaagttgcttttgaactatatccgcgcaattccgtgcagggtaatcattttcaaagttgttctgtttctctagattttgatctgtactaacatttgcttcatttggctactcagacatctctaacagctgctggttgctaccttagtcctgctccagggtcgaagggtaccaaaattatagtctcatgttctgttgactgtcctttaccatcaaagacagaactcttgaacatttccttcaatgaaactccatctgatgaccttggacaaatcatagcagacgcaaaatcgttttctgaccatgtggctccaaccagcttgtttgaagtccagtttctggatgttgcatctgaatccgtattgagtaaagccagagagctcaatcttctcagcgaatcgacgtatacaaccattggtctactgcagagggatgaaactaaacggtttttaactaaaacagaagagaaatcagtggaattagagcatggaaccaacattgcagcttcctctgataaagtacatctttgtctagggcaaaatctctacttcatgaaccgttttctcatcagatggaacctaagtgaccaccaatgtaatgaagcagactgcagaaattgtccagtgagtactgctacatcaatggaggttcggcacatggttgaacccgactggttatatctagctgagctttcaaaatgctcaacctcaaatcattctatttcatcctcacaaaaagctctcaggtccttaaagttgatcccagccgctgcaagaaaaagccttcctgtcttggtcaatcactgtggattactactctgcataccagtatgtgaaatcaccattttaaatcatttgttttgtcggatttaactataagaccatacattgattctcgtctctgtgttttcaggctattggcttcagttattgttcatgccttgaggcatctgcagtgtttcttccaagaataccactcggaggcggtcatagctcatttctctag

SEQ ID NO: 112 - protein, 462 aa, Arabidopsis thaliana
  misc_feature (1)..(462): Ceres ANNOT ID no. 842015
  misc_feature (1)..(462): LOCUS ID no. At3g24560
  misc_feature (1)..(462): Ceres SEED LINE ME11410
  misc_feature (1)..(462): Ceres GEMINI ID 5061H10
  misc_feature (8)..(95): Pfam Name: ATP_bind_3 Pfam Description: PP-loop family
  misc_feature: Bit score of 1153.9 for HMM based on sequences of FIGURE 6.
MQMTSWMQAELFILRLSRSSGVLGLAGTAFASEIFSRNLQLDAKHMKNQSIRLVRPLLDLWKEDMYKICQWGRQDWVEDPTNRSQLFVRNRIRTSIGNLESGSFKSELQAVISECRRTRSFVDKVCTDLIHQTVTVTDKGYAILDLERLNPSGVKDICLSKYLFAVLQFISQRQRPIRGNTSKLLLNYIRAIPCRTSLTAAGCYLSPAPGSKGTKIIVSCSVDCPLPSKTELLNISFNETPSDDLGQIIADAKSFSDHVAPTSLFEVQFLDVASESVLSKARELNLLSESTYTTIGLLQRDETKRFLTKTEEKSVELEHGTNIAASSDKVHLCLGQNLYFMNRFLIRWNLSDHQCNEADCRNCPVSTATSMEVRHMVEPDWLYLAELSKCSTSNHSISSSQKALRSLKLIPAAARKSLPVLVNHCGLLLCIPAIGFSYCSCLEASAVFLPRIPLGGGHSSFL

SEQ ID NO: 113 - DNA, 1112 bp, Arabidopsis thaliana
  misc_feature (1)..(1112): Ceres CLONE ID no. 97982
  misc_feature (1)..(1112): Ceres SEED LINE ME02482
  misc_feature (1)..(1112): Ceres GEMINI ID 162H6
  misc_feature: Encodes the peptide sequence given in SEQ ID NO. 114
acattctgagaagaagaagaagaaaataagaaaaaacaaaagatgaaaaccattatcctttttgtaacatttcttgctctttcttcttcatctctagccgatgagacagagactgaatttcattacaaacccggtgagatagccgatccctcgaaatggagcagtatcaaggctgaatggaaaatttgcgggacagggaagaggcaatcgccaatcaatcttactccaaaaatagctcgcattgttcacaattctacagagattcttcagacatattacaaacctgtagaggctattcttaagaaccgtggattcgacatgaaggttaagtgggaagacgatgcagggaagatcgtgatcaatgataccgactataaattggttcaaagccactggcacgcaccttcagagcattttctcgatggacagaggttggcaatggaacttcacatggtacacaaaagtgtagaagggcacttggcagtgattggagttctcttcagagaaggagaaccaaatgctttcatttcgcggatcatggacaagatccataagatcgcagacgtacaagatggagaggtcagcatcggaaagatagatccaagagaatttggatgggatcttacaaagttttatgaatacagaggttctctcacgactcctccttgcacggaagatgtcatgtggaccatcatcaacaaggtggggactgtttcacgtgagcaaattgatgtattgacagatgctcgtcgcggtggttatgagaagaacgcgagaccagctcaacctctgaacggacgtctggtttatttaaacgagcagtccagtccaagtccaactccacggctaagaataccacgagttggtccggtctaagacagtcttataggacaaggcaactccgagccctaatttccatacaaagaaaattcggaaaagaattttgaagatgtatgaaaattgggagccataactatttttttttaactattcttttgattaaaagataaaactacgcaatattatatgcataaagtttttcttttatacatgtattccaataaacaagatgtaataatatccaaccataatgagttgtttgattattttat

SEQ ID NO: 114 - protein, 277 aa, Arabidopsis thaliana
  misc_feature (1)..(277): Ceres CLONE ID no. 97982
  misc_feature (1)..(277): LOCUS ID no. At5g04180
  misc_feature (1)..(277): Ceres SEED LINE ME02482
  misc_feature (1)..(277): Ceres GEMINI ID 162H6
  misc_feature (31)..(259): Pfam Name: Carb_anhydrase Pfam Description: Eukaryotic-type carbonic anhydrase
  misc_feature: Bit score of 576.9 for HMM based on sequences of FIGURE 5.
MKTIILFVTFLALSSSSLADETETEFHYKPGEIADPSKWSSIKAEWKICGTGKRQSPINLTPKIARIVHNSTEILQTYYKPVEAILKNRGFDMKVKWEDDAGKIVINDTDYKLVQSHWHAPSEHFLDGQRLAMELHMVHKSVEGHLAVIGVLFREGEPNAFISRIMDKIHKIADVQDGEVSIGKIDPREFGWDLTKFYEYRGSLTTPPCTEDVMWTIINKVGTVSREQIDVLTDARRGGYEKNARPAQPLNGRLVYLNEQSSPSPTPRLRIPRVGPV

SEQ ID NO: 115 - DNA, 362 bp, Zea mays
  misc_feature (1)..(362): Truncation of Ceres CLONE ID no. 258034
  misc_feature (1)..(362): Ceres SEED LINE ME07978
  misc_feature (1)..(362): Ceres GEMINI ID 464D5
  misc_feature: Encodes the peptide sequence given in SEQ ID NO. 116
aaactcccgcggtgccgcgcctcgctttcgcatccccccgcggagaggagaggaagaagaacccagccaaatcctcagtcctcaggcagtcaggctgctcgcagctcgtgccgtccactctcccccgaggcagtctcttgcgttcgctgctcgacatggcgctccaggcggcgacgtccttcctcccctctgccctctccgcgcgcaaggaggggtcggtgaaggactcggcgtcgttcttgggtgttcgtctcgcggcggatggcctcaagctggacaccacagctctggtatcgataccgtcgacctcgagggggggcccgctagagtcctgctttatgagatatgcgagacgcctatga

SEQ ID NO: 116 - protein, 68 aa, Zea mays
  misc_feature (1)..(45): Truncation of Ceres CLONE ID no. 258034 at SEQ ID NO. 181
  misc_feature (1)..(68): Ceres SEED LINE ME07978
  misc_feature (1)..(68): Ceres GEMINI ID 464D5
MALQAATSFLPSALSARKEGSVKDSASFLGVRLAADGLKLDTTALVSIPSTSRGGPLESCFMRYARRL

SEQ ID NO: 117 - DNA, 525 bp, Arabidopsis thaliana
  misc_feature (1)..(525): Ceres ANNOT ID no. 564367
  misc_feature (1)..(525): Ceres SEED LINE ME10870
  misc_feature: Encodes the peptide sequence given in SEQ ID NO. 118
atgcttgtcggtgagaattgtgttcacgagacatactacgagattctctccgtgaaagaagatgctagctatgaagaaatccgaaatagctatcgttctgcgattctccactctcatccagataagctcaacaatacttctcgttctagctcagacgacgagaagtttctgaagattcaaaaagcttgggaagttctaagcgatgcagagctacgtgtagtttatgataatgatcttagatcttcaagacatgatggaatcactgctgatgagattagtattgaggatatgtcagtggagattactggtgatgtgattgatcttttttatcagtgtaggtgtggtgattacttttgtgttgattctagtgagttaggaacaatggggtttgctttgttgagagatggtgattttgtttatgttaagagattgggtgcttttgtggcgtctgttgttcttccttgtggttcttgttctttgaaaacacgagtttgggttgattctgatatgaagattcctatctag

SEQ ID NO: 118 - protein, 174 aa, Arabidopsis thaliana
  misc_feature (1)..(174): Ceres ANNOT ID no. 564367
  misc_feature (1)..(174): Ceres LOCUS ID no. At4g10130
  misc_feature (1)..(174): Ceres SEED LINE ME10870
  misc_feature (11)..(76): Pfam Name: DnaJ Pfam Description: DnaJ domain
  misc_feature (90)..(167): Pfam Name: zf-CSL Pfam Description: CSL zinc finger
  misc_feature: Bit score of 485.9 for HMM based on sequences of FIGURE 3.
MLVGENCVHETYYEILSVKEDASYEEIRNSYRSAILHSHPDKLNNTSRSSSDDEKFLKIQKAWEVLSDAELRVVYDNDLRSSRHDGITADEISIEDMSVEITGDVIDLFYQCRCGDYFCVDSSELGTMGFALLRDGDFVYVKRLGAFVASVVLPCGSCSLKTRVWVDSDMKIPI

SEQ ID NO: 119 - protein, 178 aa, Glycine max
  misc_feature (1)..(178): Ceres CLONE ID no. 594825
  misc_feature (1)..(178): Functional Homolog of  Ceres ANNOT ID no. 564367 at SEQ ID NO. 118
  misc_feature (11)..(80): Pfam Name: DnaJ Pfam Description: DnaJ domain
  misc_feature (110)..(136): Pfam Name: zf-CSL Pfam Description: CSL zinc finger
  misc_feature: Bit score of 494.1 for HMM based on sequences of FIGURE 3.
  misc_feature (10)..(10): Xaa is any aa, unknown, or other
MLLDKNDTQXTHYEVLNVKEDANYEEIRASYRSAVLSLHPDKLLKTSETSSSNQTAEERFLKVQKAWEILSNSSSRSFYDNDLRSSRQDVLAADVAEDLSLQDMMIEDDGEALELFYQCRCGDYFSVDSLELKNMGYSLLREGSGISIMNVDTSPGSVILPCGSCSLKARLLINMDVN

SEQ ID NO: 120 - DNA, 1498 bp, Populus balsamifera subsp. trichocarpa
  misc_feature (1)..(1498): Ceres ANNOT ID no.1539862
  misc_feature: Genomic Sequence
  misc_feature: Encodes the peptide sequence given in SEQ ID NO. 122
atgcttaattggaagaattcaatccgagaaacctactatgatgttttgtctgtaaaagaagatgctagttatgtagaaatccggacaagctaccgatctgccatactcaattatcatcctgataaattgcaaaatacacgtcaggcgtctgatcctgaagatgaatcggatgatagatttatgaaggtgcagaaggcttgggaaatccttgggaactccatgtctcgtgcagtttatgatagcaagctgcgagctttgaggcaagacactgaagtttcagaagatatcagtttagaggaaatgatggttgaagacaacggagaaatctttgagatgttttaccagtgccaatgtggtgattatttttccattgattcatcggagtttgagaaaatgggatacacgttatcgagggatgagtgccatatatcaatccagaaacccgatgctttgccagcatcagttgttcttccttgtggttcttgttcactacaagttcgtcttttgattaatgcagacattaaggtaccgatcggtgataatttgtaatgtatctcgcagtatattttctttggctgatggttcttcccttagtctgattttgcatgattgttgcaagaaacacgggaagattcagatcagctcgatgatattcctccatttttgttcccttgtaagctaaatgctcgagaaggaaagaatgtgcaagtgacgaagtggacatttacagacaggaacgtggtcatgtttgttaactgagaatttaaagtggatgttctgcagcatgctaatgtcacctcctgataccactaagtaagggtgaaaattgagaaggaactaatttacgagaagtgtttagaaatagagtaatgattcgaattgttttttttaaaatgaagtcaagaaaaagaaaatctggatgtgatatttttctatctagaaaattgaaaaattagtattttagtttctaaaatttgtattgagtttaaaaaaatatttgagagtttttctataagtttttcaacagtatagttttgttatctacaagtaatttttagctagatgaaagaaaaaaattatttttttgtatcttcatatttagttaatgtcacaaatttaattttttccatgaattgaaaatatatatttttcttatttaataaaatgaatttttcttaatttaaataaaataaaataaatattctataattagatcatcaccaatataaaatattaagataactattataaattacggttttgattttttataaaaaaaggttttaatcttgatgaatttcttgttttttcgatgaaaaaaattgtctccgttctcaacaaataaaaaaaaattcattttttattaaaaaaaattaagaatagaaaaaaacattatcactaaatacaccctaaaaaactcctccttttactattggagcagggaagtagaattttaaaccaaaaccgagacaggacgagcaccctctttggatgctga

SEQ ID NO: 121 - DNA, 636 bp, Populus balsamifera subsp. trichocarpa
  misc_feature (1)..(636): Ceres ANNOT ID no.1539862
  misc_feature: Encodes the peptide sequence given in SEQ ID NO. 122
atgcttaattggaagaattcaatccgagaaacctactatgatgttttgtctgtaaaagaagatgctagttatgtagaaatccggacaagctaccgatctgccatactcaattatcatcctgataaattgcaaaatacacgtcaggcgtctgatcctgaagatgaatcggatgatagatttatgaaggtgcagaaggcttgggaaatccttgggaactccatgtctcgtgcagtttatgatagcaagctgcgagctttgaggcaagacactgaagtttcagaagatatcagtttagaggaaatgatggttgaagacaacggagaaatctttgagatgttttaccagtgccaatgtggtgattatttttccattgattcatcggagtttgagaaaatgggatacacgttatcgagggatgagtgccatatatcaatccagaaacccgatgctttgccagcatcagttgttcttccttgtggttcttgttcactacaagttcgtcttttgattaatgcagacattaagaaacacgggaagattcagatcagctcgatgatattcctccatttttgttcccttggaagtagaattttaaaccaaaaccgagacaggacgagcaccctctttggatgctga

SEQ ID NO: 122 - protein, 211 aa, Populus balsamifera subsp. trichocarpa
  misc_feature (1)..(211): Ceres ANNOT ID no. 1539862
  misc_feature (1)..(211): Functional Homolog of  Ceres ANNOT ID no. 564367 at SEQ ID NO. 118
  misc_feature (11)..(80): Pfam Name: DnaJ Pfam Description: DnaJ domain
  misc_feature (94)..(171): Pfam Name: zf-CSL Pfam Description: CSL zinc finger
  misc_feature: Bit score of 568.6 for HMM based on sequences of FIGURE 3.
MLNWKNSIRETYYDVLSVKEDASYVEIRTSYRSAILNYHPDKLQNTRQASDPEDESDDRFMKVQKAWEILGNSMSRAVYDSKLRALRQDTEVSEDISLEEMMVEDNGEIFEMFYQCQCGDYFSIDSSEFEKMGYTLSRDECHISIQKPDALPASVVLPCGSCSLQVRLLINADIKKHGKIQISSMIFLHFCSLGSRILNQNRDRTSTLFGC

SEQ ID NO: 123 - DNA, 804 bp, Populus balsamifera subsp. trichocarpa
  misc_feature: Ceres ANNOT ID no.1486448
  misc_feature: Genomic Sequence
  misc_feature: Encodes the peptide sequence given in SEQ ID NO. 125
atgcttaattggaagaattcaatccgagaaacctactatgatgttttgtctgtaaaagaagatgctagttatgtagaaatccggacaagctaccgatctgccatactcaattatcatcctgataaattgcaaaatacacgtcaggcgtctgatcctgaagatgaatcggatgatagatttatgaaggtgcagaaggcttgggaaatccttgggaactccatgtctcgtgcagtttatgatagcaagctgcgagctttgaggcaagacactgaagtttcagaagatatcagtttagaggaaatgatggttgaagacaacggagaaatctttgagatgttttaccagtgccaatgtggtgattatttttccattgattcatcggagtttgagaaaatgggatacacgttatcgagggatgagtgccatatatcaatccagaaacccgatgctttgccagcatcagttgttcttccttgtggttcttgttcactacaagttcgtcttttgattaatgcagacattaaggtaccgatcggtgataatttgtaatgtatctcgcagtatattttctttggctgatggttcttcccttagtctgattttgcatgattgttgcaagaaacacgggaagattcagatcagctcgatgatattcctccatttttgttcccttgtaagctaaatgctcgagaaggaaagaatgtgcaagtgacgaagtggacatttacagacaggaacgtggtcatgtttgttaactgagaatttaaagtggatgttctgcagcatgctaatgtcacctcctga

SEQ ID NO: 124 - DNA, 600 bp, Populus balsamifera subsp. trichocarpa
  misc_feature (1)..(600): Ceres ANNOT ID no.1486448
  misc_feature: Encodes the peptide sequence given in SEQ ID NO. 125
atgcttaattggaagaattcaatccgagaaacctactatgatgttttgtctgtaaaagaagatgctagttatgtagaaatccggacaagctaccgatctgccatactcaattatcatcctgataaattgcaaaatacacgtcaggcgtctgatcctgaagatgaatcggatgatagatttatgaaggtgcagaaggcttgggaaatccttgggaactccatgtctcgtgcagtttatgatagcaagctgcgagctttgaggcaagacactgaagtttcagaagatatcagtttagaggaaatgatggttgaagacaacggagaaatctttgagatgttttaccagtgccaatgtggtgattatttttccattgattcatcggagtttgagaaaatgggatacacgttatcgagggatgagtgccatatatcaatccagaaacccgatgctttgccagcatcagttgttcttccttgtggttcttgttcactacaagttcgtcttttgattaatgcagacattaagaaacacgggaagattcagatcagctcgatgatattcctccatttttgttcccttcatgctaatgtcacctcctga

SEQ ID NO: 125 - protein, 199 aa, Populus balsamifera subsp. trichocarpa
  misc_feature (1)..(199): Ceres ANNOT ID no. 1486448
  misc_feature (1)..(199): Functional Homolog of  Ceres ANNOT ID no. 564367 at SEQ ID NO. 118
  misc_feature (11)..(80): Pfam Name: DnaJ Pfam Description: DnaJ domain
  misc_feature (94)..(171): Pfam Name: zf-CSL Pfam Description: CSL zinc finger
  misc_feature: Bit score of 585.7 for HMM based on sequences of FIGURE 3.
MLNWKNSIRETYYDVLSVKEDASYVEIRTSYRSAILNYHPDKLQNTRQASDPEDESDDRFMKVQKAWEILGNSMSRAVYDSKLRALRQDTEVSEDISLEEMMVEDNGEIFEMFYQCQCGDYFSIDSSEFEKMGYTLSRDECHISIQKPDALPASVVLPCGSCSLQVRLLINADIKKHGKIQISSMIFLHFCSLHANVTS

SEQ ID NO: 126 - protein, 173 aa, Oryza sativa subsp. japonica
  misc_feature (1)..(173): Public GI no. 115479583
  misc_feature (1)..(173): Functional Homolog of  Ceres ANNOT ID no. 564367 at SEQ ID NO. 118
  misc_feature (12)..(80): Pfam Name: DnaJ Pfam Description: DnaJ domain
  misc_feature (95)..(130): Pfam Name: zf-CSL Pfam Description: CSL zinc finger
  misc_feature: Bit score of 463.3 for HMM based on sequences of FIGURE 3.
MLEGGNFSNQETLYEVLSVRKDATYDEIRAAYKSAVLNTHPDKAQMALNPLVSSSERNEFLSVQKAWEILRYPKSRAEYDKQLQSSRQNLEIVATEIEIDDMIVESTADSVELLYPCRCGDYFSITSRELGQIGISVREDGEMELHTSDSVPSSVVLGCGSCSLKARLVTNKT

SEQ ID NO: 127 - DNA, 1702 bp, Arabidopsis thaliana
  misc_feature (1)..(1702): Ceres ANNOT ID no. 851745
  misc_feature (1)..(1702): Ceres SEED LINE ME11351
  misc_feature (1)..(1702): Ceres GEMINI ID 5060C4
  misc_feature: Encodes the peptide sequence given in SEQ ID NO. 128
atggcggacaaatcaagcagatcactgatattgtacggagacggcttggctcgatttgtcgatccgtcaaataccaacatccattctcttgcttccgtcgctacttgtggcttcttgagccttcctaatgcacctccaggtctctctttctctctccctcgctatctcttcataaatttggttactttcgtttgattcgtcttgaatttcagtcaaaatcgctactttaagggttttcacttgttaggatttcttagtgttgatcagaattgaaccatatcgtttggattcgattgtgacttttttaatagtccaatatgaaactccagtatacaattgatctaactggccaacttagagttcttgttcagtgtcaattgacccaattgcttaagaaacaaagatttgagatcacttgtgttacattgcccttgctttgacattttgctattgatctaactcactctgctgtttcaatattgcagaaactgagaatgaaagaatagttcgagaattctcccacttgctggatgcatccgaagcttattccatagctgtgagatactttactctctactatattaatttctatgtgagccgagttttgtggcaaaatatttaacaatctcagtgtgtttacatagttattcacgaattagagattaacgaaccatgatctgatttcttaatagagtggactaaaaccaaagggaaatggaaatgatatctcaactttggctgaaaggttatacttttcacttatctctatagttttatactctctttgataatcaatagctggtatatccatatgttgatgctagtatttactttaatgccaggtttatgggactcaaagctgctttagttacggacagttctactctgacttctttcggaaaactgattggcttagatgtattacagcttagtgaaatatgccaagagagtgattcctttccttctgatgccacatcatctaaactactaaagctgcttggatttgaaggaggaaagtgcttggatgtgaacctatatgacttggtttttgttcatttcggggttgatgaatataataacgggaacaacatgggaattctcgactctttgattggcagtattatgggaatggctcaaccaggttcagagattctatcgcggttgcatctgtctgtcgttcttagctatggttctgtcacagacaaagatgtttcagtttttccaatcaagactccacaagaagacattaacccggcatttataggacttgtcccgcgtcagagctacaccatgcgaggtgaaaagacacgggatgatgttcggtaagagattcgatgaatttttgtcaaaaccaaaagaatttgatttgaacttttctgaaatcatcatttcgttcttgacgggtttggtcattcttgcaacctacaggcactactgtcctatgttggtagctcagtggcagcatggggtgacccggaaagacttagttgataccttatcatttgaagctctcaaaaaggtatggtttctgtttaatgcaagttctgctataataaacgtcacggcttcttgtctcaaggttaatttttttgttgtttctctcttttcatcatagctctgtggaaatcttgttataccggctgatcggttcatccacgaagttgctttcaaactttggaaagccccaaaatatggagcttaa

SEQ ID NO: 128 - protein, 306 aa, Arabidopsis thaliana
  misc_feature (1)..(306): Ceres ANNOT ID no. 851745
  misc_feature (1)..(306): Ceres LOCUS ID no. At5g11810
  misc_feature (1)..(306): Ceres SEED LINE ME11351
  misc_feature (1)..(306): Ceres GEMINI ID 5060C4
  misc_feature: Bit score of 804.9 for HMM based on sequences of FIGURE 4.
MADKSSRSLILYGDGLARFVDPSNTNIHSLASVATCGFLSLPNAPPETENERIVREFSHLLDASEAYSIASGLKPKGNGNDISTLAERFMGLKAALVTDSSTLTSFGKLIGLDVLQLSEICQESDSFPSDATSSKLLKLLGFEGGKCLDVNLYDLVFVHFGVDEYNNGNNMGILDSLIGSIMGMAQPGSEILSRLHLSVVLSYGSVTDKDVSVFPIKTPQEDINPAFIGLVPRQSYTMRGEKTRDDVRHYCPMLVAQWQHGVTRKDLVDTLSFEALKKLCGNLVIPADRFIHEVAFKLWKAPKYGA

SEQ ID NO: 129 - DNA, 2283 bp, Populus balsamifera subsp. trichocarpa
  misc_feature: Ceres ANNOT ID no.1455259
  misc_feature: Genomic Sequence
  misc_feature: Encodes the peptide sequence given in SEQ ID NO. 131
atggcagacaaggcaagcagaggcttagtgatatacggagatggactggcttctttcatcaatccttcccatgctcatctccactctcttgcttccaaagctttctgcggtttcttaaccctccccaatgctcctccctcaggtttcactcactctcctatttctcttactttaactctcttttaattcatattgcctattttttatcacttagaatttcacaatcttgttctggttttgttatggaattagcttagctgtgggtattagtataaagggttgcgatttatgcatgcttagagttatagcacagaacagtttaataggattattggtgatttattctttatttattttgatgatcttgaattctactatcatggctgttatatccgtggttgatttttacaataaggttttgaggctgctattcatctttaaaaaatatttgcttttatgggttcttagaatttttttttaatcttttctatgatatgcgcagcggaaatgtttgatctgttgcgttgtgattttgatgtaattttcatatccaatattgttacaggatttgacagcacacatatgcgaatgtggatgtgatcaatttgttatattttgaactgaaaactatgtttctggtattaaatttttgagtcgtataagattataaagtctaggtgtgtttaatttgagtttttgaagttgttgtgtatatgattacctggacttacttggatttagattgcagaaagtgaggatgagaggatagttagagagtttgcgtatctgttagatgcatgtgaagcttatcagaatgtggtaagatatctttaactataattttggacataaaagagtggtttcttgttgtaagctattgacagttattgttctttgattcttgttagagttctcagagtacctcaattccaaccatatcagagaggtattggtagtttttttttttttccagtttatgtttagttttttaataccagtggcaggctagatgttgatttatatttgcatgaaaccaatcaacatgttctatgatcttacttcaggttcatgggaatgaaggctgctataataactaacaatcctggcttgaaatcttttggtggcaaactcggtttgactgtgtttccattcaacgatttaaaggggaatgaattttccctttctggatcatctactgattttgtgacatttgagttactcaagttgcttggatttcaagaggggaagacactagagacaagtcaatttgatttagtatttgtgcatgttggagctggtgaaagagtgaatgctgagggacacaagactattgccattgatgtggaatatattgatgctttagttgatggcatcatgcgcatagcacaacctggctctgaaattggttctcgtctgcacttgtcccttgtaatgagctatggttatgttacagaaggtgatggtagagatttatcaattttgacttctaaagatgagatggatcctgctctttcaaagctcttccctcttcaaagttatactatgaaaggagaaaaaccacgaaatgatatcaggtaagggaaaaaaaaaaagggtggtaagcttcttgtaataatttcaaattcctttggatcctgctaacttgtgatcaacaggtaccattgcccaatgttaatttctcaatggcagtatgctgtaacccgtgtggatatggcagaaacattttcttttaaagattttaaagaggtaagttttaagattactgggttttatttttgcagattcacatcttataaatttattggacagatttcatttatgaatatatgacctttcattttaccatccatcatcaacctattagttttgactaatattttcagataatggaatggtaggggagttagtctgtcactaacatcagacgtgatcctgaaagtggcatttaactttgaaactgaaacaatttcttggtaaactttgtgtgtgtaggcttaagaattatctgtatataattgcttcttgatttatttgcatcaaatacgtgatattcttcctcttaatttctggatcctccaggatagatagatcaatttctcatgtcagatgtatgtcaattgaccttatagttcaaatgtttcagtatatctaaatgcttttatgcatttccgttaagcattttccttttcttttcagcatggtggaaatcttgtaataccagctgatagattcctgcacgaggtagcatttaagctttggaaggcccccaagtatggagcataa

SEQ ID NO: 130 - DNA, 939 bp, Populus balsamifera subsp. trichocarpa
  misc_feature (1)..(939): Ceres ANNOT ID no.1455259
  misc_feature: Encodes the peptide sequence given in SEQ ID NO. 131
atggcagacaaggcaagcagaggcttagtgatatacggagatggactggcttctttcatcaatccttcccatgctcatctccactctcttgcttccaaagctttctgcggtttcttaaccctccccaatgctcctccctcagaaagtgaggatgagaggatagttagagagtttgcgtatctgttagatgcatgtgaagcttatcagaatgtgagttctcagagtacctcaattccaaccatatcagagaggttcatgggaatgaaggctgctataataactaacaatcctggcttgaaatcttttggtggcaaactcggtttgactgtgtttccattcaacgatttaaaggggaatgaattttccctttctggatcatctactgattttgtgacatttgagttactcaagttgcttggatttcaagaggggaagacactagagacaagtcaatttgatttagtatttgtgcatgttggagctggtgaaagagtgaatgctgagggacacaagactattgccattgatgtggaatatattgatgctttagttgatggcatcatgcgcatagcacaacctggctctgaaattggttctcgtctgcacttgtcccttgtaatgagctatggttatgttacagaaggtgatggtagagatttatcaattttgacttctaaagatgagatggatcctgctctttcaaagctcttccctcttcaaagttatactatgaaaggagaaaaaccacgaaatgatatcaggtaccattgcccaatgttaatttctcaatggcagtatgctgtaacccgtgtggatatggcagaaacattttcttttaaagattttaaagagcatggtggaaatcttgtaataccagctgatagattcctgcacgaggtagcatttaagctttggaaggcccccaagtatggagcataa

SEQ ID NO: 131 - protein, 312 aa, Populus balsamifera subsp. trichocarpa
  misc_feature (1)..(312): Ceres ANNOT ID no. 1455259
  misc_feature (1)..(312): Functional Homolog of  Ceres ANNOT ID no. 851745 at SEQ ID NO. 128
  misc_feature: Bit score of 863.1 for HMM based on sequences of FIGURE 4.
MADKASRGLVIYGDGLASFINPSHAHLHSLASKAFCGFLTLPNAPPSESEDERIVREFAYLLDACEAYQNVSSQSTSIPTISERFMGMKAAIITNNPGLKSFGGKLGLTVFPFNDLKGNEFSLSGSSTDFVTFELLKLLGFQEGKTLETSQFDLVFVHVGAGERVNAEGHKTIAIDVEYIDALVDGIMRIAQPGSEIGSRLHLSLVMSYGYVTEGDGRDLSILTSKDEMDPALSKLFPLQSYTMKGEKPRNDIRYHCPMLISQWQYAVTRVDMAETFSFKDFKEHGGNLVIPADRFLHEVAFKLWKAPKYGA

SEQ ID NO: 132 - DNA, 1355 bp, Gossypium hirsutum
  misc_feature (1)..(1355): Ceres CLONE ID no.1939499
  misc_feature: Encodes the peptide sequence given in SEQ ID NO. 133
atagaaagtggattctccatctttgcttcctgtttctctttctcggtttcttcttcgatcctattatttgagtatttgagtaacagcaatggcggacaagccaagccgagccttgattttatacggtgacgggttggcccgtttcattcacccatcacatgcccatctccactctctcgcatctactgccaactgtggtttcttgagcctccctaatgctcctccttcagaaagcgaggatgataggactgtaagagagtttgctgtgctggtggatgcctttgagacattgaacaagaacggccaattttctagtgaggtaaagtctcaaaagtcatctttgattccaaccatgtctgagaggtttatgggaatgagagctgctatattgagtaacaattctggtttgaagtctttcggagaaaaacttggcttcaatgtattgaacttgaatggattgtttggaaatagtaatactccccctgtttcatcgattgataatttggcttctaagttgctgtccttacttgcattccaggaagggaaggtaacggaatccaaccagtttgatttagtgattttgcatattgggtctggggagaacttgaatgctaatagtggcaatgatgtggaattcttgaatgctttgcttggtgctattatgagtatagctaagcctggaactgaaattcgttctcgtctactcttgtcccttgtaatgagctatgggtctgtgtcaaaggctgatgagctgggtttgtccattttgagcactaaatatgagaagaatcctaatctttcagcacttttccctaatcagagttacaccatgagaggggaaagtcaaagaaatgatgttaggcagtatggtccaatgttatttgctcaatatcagtatgctgtaacccgcaaggatatggtagagactttttcttttgaagaatttaaagagtgttcaggaaatcttactataccggctgaccggttgctgcatgagatagcatttaagctttggaaggcgcccaagtatggtgcctaagagggacttttatctgtctccgcttacatgatttaaagttccaacttttgaatataagctccaaaataagagaaaggtgatatagataaggttatggtggatcctgtactgttgaaatcctttttcccaaggtggtgttactcttcaccttaatttaagctgacgatatttgtctttgtataagtgggatatgatgttacacttgctcactattgacccaagccagttaatggtcacgtattgcagagttgatctcaactttatattgctcatcattatatgggttaaggttctaatcaaaaaaaaaaaaaaaaaa

SEQ ID NO: 133 - protein, 316 aa, Gossypium hirsutum
  misc_feature (1)..(316): Ceres CLONE ID no. 1939499
  misc_feature (1)..(316): Functional Homolog of  Ceres ANNOT ID no. 851745 at SEQ ID NO. 128
  misc_feature: Bit score of 843.5 for HMM based on sequences of FIGURE 4.
MADKPSRALILYGDGLARFIHPSHAHLHSLASTANCGFLSLPNAPPSESEDDRTVREFAVLVDAFETLNKNGQFSSEVKSQKSSLIPTMSERFMGMRAAILSNNSGLKSFGEKLGFNVLNLNGLFGNSNTPPVSSIDNLASKLLSLLAFQEGKVTESNQFDLVILHIGSGENLNANSGNDVEFLNALLGAIMSIAKPGTEIRSRLLLSLVMSYGSVSKADELGLSILSTKYEKNPNLSALFPNQSYTMRGESQRNDVRQYGPMLFAQYQYAVTRKDMVETFSFEEFKECSGNLTIPADRLLHEIAFKLWKAPKYGA

SEQ ID NO: 134 - protein, 308 aa, Glycine max
  misc_feature (1)..(308): Ceres CLONE ID no. 605517
  misc_feature (1)..(308): Functional Homolog of  Ceres ANNOT ID no. 851745 at SEQ ID NO. 128
  misc_feature: Bit score of 828.6 for HMM based on sequences of FIGURE 4.
MADKPSRSLVLFGDGLARSIDSSHSHFHSLASLSSCGFLSLPNSPPSESEDERTVREFAVLLDACHTYSNMKGQISDRDNQEDPPKQTLPDRFIGMKAAILTNNSSLKSFSAKLGFSVLKLDELVGGGSAEVVALELLKFLGFKEGKVLDSDHFDLVFFHIGAGEQKVVAADVGYMDALVGGVMSQAQPGSDISSRLHLSVVMSYGNVLEADDSKFSVLKRVDEKNSHLSMLYPLQSYTMKGGIPRKDVRHYSPMLIAQWQSAVTRKDNAERFSFEDFMEHGGNLTIPADRFLHEIAFKLWKAPKYGA

SEQ ID NO: 135 - DNA, 525 bp, Sorghum bicolor
  misc_feature: Ceres ANNOT ID no.6068784
  misc_feature: Encodes the peptide sequence at SEQ ID NO 136
atggttctaggcagcaatatttcctttcagaaaaccttgtatgaggttttttctgtgagtgaagatgctacatatgatgaaattcgtgcagcatacaggtctgctgcgctgaacacacatcctgataaagcacagacaactctcgagtcatctgtgccttccagtgagcaacaggaattttgtagtgtgcagaaagcatgggaaattctacgccatcctgcatctagagcagactatgataagcagctgcaatcatccagacagaatattgagatcattgcgtctgaaatcaaagtcggggatatgatcattgagagcaccgctgatactgtagagctgttgtacccatgcaggtgtggtgattattttttcatcacttcatgtcaacttagtgagatgggaattttcgtcagtggagatggagaagtagaactgcaggcgtctgattctgcatcagcttctgttgttcttggctgtggctcttgttctctcaagatacggttggttataaatgtacctcagtga

SEQ ID NO: 136 - protein, 174 aa, Sorghum bicolor
  misc_feature: Ceres ANNOT ID no.6068784
  misc_feature: Bit score of 347.0 for HMM based on sequences of FIGURE 3.
  misc_feature (12)..(80): Pfam Name: DnaJ Pfam Description: DnaJ domain
  misc_feature (95)..(171): Pfam Name: zf-CSL Pfam Description: CSL zinc finger
  misc_feature: Functional Homolog Of Ceres ANNOT ID no. 564367 at SEQ ID NO. 118
MVLGSNISFQKTLYEVFSVSEDATYDEIRAAYRSAALNTHPDKAQTTLESSVPSSEQQEFCSVQKAWEILRHPASRADYDKQLQSSRQNIEIIASEIKVGDMIIESTADTVELLYPCRCGDYFFITSCQLSEMGIFVSGDGEVELQASDSASASVVLGCGSCSLKIRLVINVPQ

SEQ ID NO: 137 - DNA, 525 bp, Sorghum bicolor
  misc_feature: Ceres ANNOT ID no.6041876
  misc_feature: Encodes the peptide sequence at SEQ ID NO 138
atggttctaagcagcaatatttcggttcggaaaactttatatgaggttttatctgtgagtgaagatgctacatatgatgaaatccgtgcagcatacaggtctgctgctctgaccacacaccctgacaaagcacatacaactctcgagtcgtctgtgccttccagtgagcaacaagaattttttagtgtgcagaaagcatgggaaatcctacgccacccaacatctagagcagactatgataagcagctgcaatcatccagacagaacattgagatcatcgcgtctgaaatcgaagtcggggatatgatcatcgagagcactgctgatactctagtgctgctgtacccatgcaggtgtggtgattatttttccatcactaagtgtgaacttagtgggatgggacatttggtcagtggagatggagaagtagaactgcaggcgtctgattctgcatcagcttccattgttctgggctgtggctcttgttctctgaaaataaagttggttataaatgaaacttcatga

SEQ ID NO: 138 - protein, 174 aa, Sorghum bicolor
  misc_feature: Ceres ANNOT ID no.6041876
  misc_feature: Bit score of 332.8 for HMM based on sequences of FIGURE 3.
  misc_feature (12)..(80): Pfam Name: DnaJ Pfam Description: DnaJ domain
  misc_feature (95)..(172): Pfam Name: zf-CSL Pfam Description: CSL zinc finger
  misc_feature: Functional Homolog Of Ceres ANNOT ID no. 564367 at SEQ ID NO. 118
MVLSSNISVRKTLYEVLSVSEDATYDEIRAAYRSAALTTHPDKAHTTLESSVPSSEQQEFFSVQKAWEILRHPTSRADYDKQLQSSRQNIEIIASEIEVGDMIIESTADTLVLLYPCRCGDYFSITKCELSGMGHLVSGDGEVELQASDSASASIVLGCGSCSLKIKLVINETS

SEQ ID NO: 139 - DNA, 1215 bp, Zea mays
  misc_feature: Ceres CLONE ID no.333468
  misc_feature: Encodes the peptide sequence at SEQ ID NO 140
aaaatcggaatacacgagcgagcaagtccctaatccccatttctaaatctctaaccctagcgtactgagcttggcatggcggcggcagtgtcccgggctcccagcggcacagtcgtgcggcgcgagcgcagcctctgtgcctaggctgcgcctgcacgtcggccggcggcacgcggtggctaataggctggaggcactgcccgagcggctgcccaccagtggtccagctcccactatggttctaaccagcaatatttcggttcagaagaccttgtacgaggttttatctgtgagtgaagacgctacatacgatgagatccgcgcagcatacagcgtgcagaaagcatgggaagtcctacgccatcctacatccagagcagattatgacaagcagctgcagtcatccagacagagcatcgagatcatcgcatccgaaatccaagtcggggacatgatcgtcgagagcgctgctggtgctctagagctgctgtacccatgcaggtgtggcgattatttctccatcacttcgggtgaacttagcgggatggggattgtcgtcactcgggatggagaagaagtagaagagctgcaggcgtcggattctgcatcggcttctgtcgttctgggctgtggctcctgttctctcaaaatacggctggttatagatggaagctcatgatcacatttcaggctctggttgcacgctgttcagcagtgtggtcagtttgaatgcttaacaaccacctccacatgtttgtcaaacagtatgcaattcccggtctgctgaaaatcttgcagcttatcccgatggtggttgcattgtgataaatggcattttgaccgttgttatcagctaacgaccatcgtcaagtccagctgctgggagttcaaagatgttccggtggtggttattcggtagatgtttagttaatgttgtttttctaggccaatttaatggtctcatcggtcagccattcacctaaacgatggctaaactaacgggttttttatttggtatcagctgaatgaatgctgggtgtttttgatagctgctgatgagaaagaagtgttggctgtggctgttggtgttgtattgaataacttgtgaccgtatctgtactgctaaacatgggcagcatcccatgcagaagtagaacggctatgtatctgtatctttagaatttgatattcgtaaaactgtgtctgttcggctcc

SEQ ID NO: 140 - protein, 147 aa, Zea mays
  misc_feature: Ceres CLONE ID no.333468
  misc_feature: Bit score of 236.7 for HMM based on sequences of FIGURE 3.
  misc_feature (12)..(32): Pfam Name: DnaJ Pfam Description: DnaJ domain
  misc_feature (66)..(144): Pfam Name: zf-CSL Pfam Description: CSL zinc finger
  misc_feature: Functional Homolog Of Ceres ANNOT ID no. 564367 at SEQ ID NO. 118
MVLTSNISVQKTLYEVLSVSEDATYDEIRAAYSVQKAWEVLRHPTSRADYDKQLQSSRQSIEIIASEIQVGDMIVESAAGALELLYPCRCGDYFSITSGELSGMGIVVTRDGEEVEELQASDSASASVVLGCGSCSLKIRLVIDGSS

SEQ ID NO: 141 - protein, 174 aa, Oryza sativa subsp. japonica
  misc_feature: Public GI ID no.115476866
  misc_feature: Bit score of 308.8 for HMM based on sequences of FIGURE 3.
  misc_feature (12)..(80): Pfam Name: DnaJ Pfam Description: DnaJ domain
  misc_feature (96)..(132): Pfam Name: zf-CSL Pfam Description: CSL zinc finger
  misc_feature: Functional Homolog Of Ceres ANNOT ID no. 564367 at SEQ ID NO. 118
MPLSSNISTQKTHYEVLSVNEGATYDEVRAGYRAAILNAHPDKSQAKLDSLVSSVEHGEFFSVQKAWEVLRDPKSRTEYDKQLQTSRQNSANIAYEIEIEEMTVESTGDAMELMYPCRCGDHFSILSSDLAEMGILVDDDGEIYFQSSDCVSASVVLSCGSCSLKTRLVINRTS

SEQ ID NO: 142 - DNA, 1020 bp, Sorghum bicolor
  misc_feature: Ceres ANNOT ID no.6086804
  misc_feature: Encodes the peptide sequence at SEQ ID NO 143
atgctacgcctgcggttccggccagctcacctgtcgctgaagctggccttcaccctctccctcgccgtctccttctccgtctcctgctgcgcctcctcctcctcttcctcgccccgcacatcagccagctccccggagggcgtagccgcggacctcctctccgtgctcggcggcccgcgcgctgcggcgcgggtgccggcggcggaggcctcgcggctccgcgcctgcctccggttcctcgccccggccaaccccaccacggccccaaaggtctcgtcttggagccgcggaggccctcggaagttccttctggaacgttgcgatgcggggacggcggaggcggacgagatggtgatgtggccgccggccccggtcttggagctggcccggctggccgtcgactccggaggcgatcccggtgccatccaccgtgcgctcgacccaacgatgctgccggtgccagatgttgaggcggcccagaagaataaatgcgaactcacaagaacaccatatgggaggcgctttgccaatgaggagatcaattcatattttgccttcttgttcgaattgattgtggcacggggaccttcagttggattaaatgtatccctgaatcgctatgatttgttccatgggcatcttttccttgcatctggaacaggacggcttggaattctgttccatgctaaagaatacccagcatttaataaggaattgtttccatattatttgggatattgccaagcagaatctagtgtaccatatgatgattctatgaatttgcgcaatgtcctttggttagcacctttgccatcaaatgagacaaaagcttggttagcaccaggagcattagttgtcttggacgcacatcctgacggaattatctatcaagagatgatacgtgactatgttcaaattgtaagaacaatatacgaagatgatcttggggaggttgctgttgatgtcaattatctaaatgtggcaaatgcagctcctatagatagagttttcatttgctga

SEQ ID NO: 143 - protein, 339 aa, Sorghum bicolor
  misc_feature: Ceres ANNOT ID no.6086804
  misc_feature: Bit score of 810.9 for HMM based on sequences of FIGURE 2.
  misc_feature: Functional Homolog Of Ceres ANNOT ID no. 571199 at SEQ ID NO. 102
MLRLRFRPAHLSLKLAFTLSLAVSFSVSCCASSSSSSPRTSASSPEGVAADLLSVLGGPRAAARVPAAEASRLRACLRFLAPANPTTAPKVSSWSRGGPRKFLLERCDAGTAEADEMVMWPPAPVLELARLAVDSGGDPGAIHRALDPTMLPVPDVEAAQKNKCELTRTPYGRRFANEEINSYFAFLFELIVARGPSVGLNVSLNRYDLFHGHLFLASGTGRLGILFHAKEYPAFNKELFPYYLGYCQAESSVPYDDSMNLRNVLWLAPLPSNETKAWLAPGALVVLDAHPDGIIYQEMIRDYVQIVRTIYEDDLGEVAVDVNYLNVANAAPIDRVFIC

SEQ ID NO: 144 - protein, 328 aa, Oryza sativa subsp. indica
  misc_feature: Public GI ID no.125559567
  misc_feature: Bit score of 796.6 for HMM based on sequences of FIGURE 2.
  misc_feature: Functional Homolog Of Ceres ANNOT ID no. 571199 at SEQ ID NO. 102
MFQSFSVSPILSLKLAFAVALAVSFSVSCCAAPPSPRAVAADLLAVLAGPGAAARVPPAAESARLRACLRFLSPVLPLPAAAAISEGRAARKVLVERGGADEADGMVMWPPAPVMELARLAVDSGGDPGAIHRALDPTMLPVPDVQRAKRNKCQLTRTPYGRRFANKGINSYLAFLFELIAARGPSVGLNVSLSRYDFFHGHLFLASGTGRLGILFHAKEYPAFDKKLFPYSLGFCQAGSNVVYDDSMNLRNILWLAPLPSNETKAWLSPGVLVVLDAHPDGIIYQDMIRDYVRDVRTIYEDDFGEVAVDVNYLNVANSAPANRVFIC

SEQ ID NO: 145 - protein, 328 aa, Oryza sativa subsp. japonica
  misc_feature: Public GI ID no.125601478
  misc_feature: Bit score of 798.8 for HMM based on sequences of FIGURE 2.
  misc_feature: Functional Homolog Of Ceres ANNOT ID no. 571199 at SEQ ID NO. 102
MFQSFSVSPILSLKLAFAVAFAVSFSVSCCAAPPSPRAVAADLLAVLAGPGAAARVPPAAESARLRACLRFLSPVLPLPAAAAISEGRAARKVLVERGGADEADGMVMWPPAPVMELARLAVDSGGDPGAIHRALDPTMLPVPDVQRAKRNKCQLTRTPYGRRFANKDINSYLAFLFELIAARGPSVGLNVSLSRYDFFHGHLFLASGTGRLGILFHAKEYPAFDKELFPYSLGFCQAGSNVVYDDSMNLRNILWLAPLPSNETKAWLSPGVLVVLDAHPDGIIYQDMIRDYVRDVRTIYEDDFGEVSVDVNYLNVANSAPANRVFIC

SEQ ID NO: 146 - protein, 298 aa, Oryza sativa subsp. japonica
  misc_feature: Public GI ID no.115474011
  misc_feature: Bit score of 683.7 for HMM based on sequences of FIGURE 2.
  misc_feature: Functional Homolog Of Ceres ANNOT ID no. 571199 at SEQ ID NO. 102
AKEDVSVIFCVSHPLAEAGLRRRLRRLLLRLLLRLRACLRFLSPVLPLPAAAAISEGRAARKVLVERGGADEADGMVMWPPAPVMELARLAVDSGGDPGAIHRALDPTMLPVPDVQRAKRNKCQLTRTPYGRRFANKDINSYLAFLFELIAARGPSVGLNVSLSRYDFFHGHLFLASGTGRLGILFHAKEYPAFDKELFPYSLGFCQAGSNVVYDDSMNLRNILWLAPLPSNETKAWLSPGVLVVLDAHPDGIIYQDMIRDYVRDVRTIYEDDFGEVSVDVNYLNVANSAPANRVFIC

SEQ ID NO: 147 - DNA, 1032 bp, Populus balsamifera subsp. trichocarpa
  misc_feature: Ceres ANNOT ID no.1516248
  misc_feature: Encodes the peptide sequence at SEQ ID NO 148
atgagtgcgtttaaagaaaaagtctcaaatcaactatctcgtctctttgccggttcacccaattcttcttctcctgataattctcaggccaggccgtgctctaaaggggaaaaatcatcttcatattttcccttcgccatcccttcactaagctttgtcgggtctagatcgaacaagcaccaggatgagttaaaaccaattcaatcacttcctgttagatggaacggtaaagatcttgaacagcgagaagaatactcagataggtatcatgaatgcacttttgaaaacaatcaaactgttaaaagtcatgacggtaatgatgatgctgcccctgcaaggagcagtagtgatagtgatttatttgaagaagcaaataatcagactccacgaaagccttttccctgtctcatggatgagtccacttttatttcctcagagctgtatgagttcttgctctcatcccttcctaatattgtgaagggatgccagtggaccttgctgtacagtacgttgaagcatggcatatcacttcatacacttattcgcaagagtgctgctgtttctggtccttgtttgctgattaccggtgatagacaaggtgctgtgtttggtgggctgctagaatgtccattgaaacctactgccaagagaaaatatcaggggacaaaccaatcatttgtatttacaaccatttatggtgaaccaaggatatttagaccaactggtgccaacagatattactacttgtgcttgaatgacatactagcacttggaggtggtggcaactttgccttgtgcatggatggagatctgttgaatggaactagtggaccttgtcaaacgtttggtaacttgtgcctggcccataacccagagtttgagttaaagaatgttgagttactgtctgaatcccgaacagtttcgtggttgacaagtgaaaagcttcgtttggaatttcaacctggacatcctggtctgaaatctgttgagctggaaacggagggacttcataggaaggagttgcgtggctag

SEQ ID NO: 148 - protein, 343 aa, Populus balsamifera subsp. trichocarpa
  misc_feature: Ceres ANNOT ID no.1516248
  misc_feature: Bit score of 561.8 for HMM based on sequences of FIGURE 1.
  misc_feature (166)..(304): Pfam Name: TLD Pfam Description: TLD
  misc_feature: Functional Homolog Of Ceres ANNOT ID no. 826303 at SEQ ID NO. 96
MSAFKEKVSNQLSRLFAGSPNSSSPDNSQARPCSKGEKSSSYFPFAIPSLSFVGSRSNKHQDELKPIQSLPVRWNGKDLEQREEYSDRYHECTFENNQTVKSHDGNDDAAPARSSSDSDLFEEANNQTPRKPFPCLMDESTFISSELYEFLLSSLPNIVKGCQWTLLYSTLKHGISLHTLIRKSAAVSGPCLLITGDRQGAVFGGLLECPLKPTAKRKYQGTNQSFVFTTIYGEPRIFRPTGANRYYYLCLNDILALGGGGNFALCMDGDLLNGTSGPCQTFGNLCLAHNPEFELKNVELLSESRTVSWLTSEKLRLEFQPGHPGLKSVELETEGLHRKELRG

SEQ ID NO: 149 - DNA, 1095 bp, Populus balsamifera subsp. trichocarpa
  misc_feature: Ceres ANNOT ID no.1462954
  misc_feature: Encodes the peptide sequence at SEQ ID NO 150
atgagtgcgtttaaagaaaaagtctcaaatcaactatctcgtctctttgccggttcacccaattcttcttctcctgataattctcaggccaggccgtgctctaaaggggaaaaatcatcttcatattttcccttcgccatcccttcactaagctttgtcgggtctagatcgaacaagcaccaggatgagttaaaaccaattcaatcacttcctgttagatggaacggtaaagatcttgaacagcgagaagaatactcagataggtatcatgaatgcagcacaatatgcgagacagaggaattccaaaaatcttgtaaagacgacaaagaatacaatgcagcttttgaaaacaatcaaactgttaaaagtcatgacggtaatgatgatgctgcccctgcaaggagcagtagtgatagtgatttatttgaagaagcaaataatcagactccacgaaagccttttccctgtctcatggatgagtccacttttatttcctcagagctgtatgagttcttgctctcatcccttcctaatattgtgaagggatgccagtggaccttgctgtacagtacgttgaagcatggcatatcacttcatacacttattcgcaagagtgctgctgtttctggtccttgtttgctgattaccggtgatagacaaggtgctgtgtttggtgggctgctagaatgtccattgaaacctactgccaagagaaaatatcaggggacaaaccaatcatttgtatttacaaccatttatggtgaaccaaggatatttagaccaactggtgccaacagatattactacttgtgcttgaatgacatactagcacttggaggtggtggcaactttgccttgtgcatggatggagatctgttgaatggaactagtggaccttgtcaaacgtttggtaacttgtgcctggcccataacccagagtttgagttaaagaatgttgagttactgtctgaatcccgaacagtttcgtggttgacaagtgaaaagcttcgtttggaatttcaacctggacatcctggtctgaaatctgttgagctggaaacggagggacttcataggaaggagttgcgtggctag

SEQ ID NO: 150 - protein, 364 aa, Populus balsamifera subsp. trichocarpa
  misc_feature: Ceres ANNOT ID no.1462954
  misc_feature: Bit score of 547.8 for HMM based on sequences of FIGURE 1.
  misc_feature (187)..(325): Pfam Name: TLD Pfam Description: TLD
  misc_feature: Functional Homolog Of Ceres ANNOT ID no. 826303 at SEQ ID NO. 96
MSAFKEKVSNQLSRLFAGSPNSSSPDNSQARPCSKGEKSSSYFPFAIPSLSFVGSRSNKHQDELKPIQSLPVRWNGKDLEQREEYSDRYHECSTICETEEFQKSCKDDKEYNAAFENNQTVKSHDGNDDAAPARSSSDSDLFEEANNQTPRKPFPCLMDESTFISSELYEFLLSSLPNIVKGCQWTLLYSTLKHGISLHTLIRKSAAVSGPCLLITGDRQGAVFGGLLECPLKPTAKRKYQGTNQSFVFTTIYGEPRIFRPTGANRYYYLCLNDILALGGGGNFALCMDGDLLNGTSGPCQTFGNLCLAHNPEFELKNVELLSESRTVSWLTSEKLRLEFQPGHPGLKSVELETEGLHRKELRG

SEQ ID NO: 151 - DNA, 1461 bp, Glycine max
  misc_feature: Ceres CLONE ID no.467151
  misc_feature: Encodes the peptide sequence at SEQ ID NO 152
ggggtgctcaggaatctgaaagctgcgacacatccacaaagaacaccacsrctgaagttatcttgtcctcaaatgtgccatagaaacaaggacaaaaaaatcccatgtttctgaagttagcaggtttggagttccataagtagaaatgggaaaaagacaatctttgcgcaacaaagccacccaccttgtttctgtccttctcaaccccatctccgattccgacacttccaatcccaaaacctccaaacaacacccaccaacaccaacacctacacctccttccggacaagtaggtggatcagagacaaatgatgaagagggtaaccgtggtttagttgatgggcctgatacttcgtccttcactgcgttcctctattccttattgtcttcctctgacactggagataatgcaaactcacgcgtgcagagtgatgataataaatctgctgcacctgatcacaaccctttaccagactcatcatcgctgaaggaaaatggtgggaggaagagtttgatttytagaagcaagcaatcaattggtaaggctattcgcagaattggtggatttcgccatcaggatcgcagggataatgttgaaatgaaattggatgatgggcatggttctaaggtttctggtggtgttgagatgaggagaattgaacctgtgactgtgcctttggttgatcttccagaaatttctgaaccttcagttctcctttcagatagtatacggaacgttctctatgtttctcttccgcctcttattcacggaaggaaatggctgttgttgtacagcacttggaggcatggtatatcactttccactctttaccggagaagcatgctttggcctggattgagtttgctggttgttggagataaaaaaggagcagtatttggcagcttagttgaagcacctctcagatcatccagcaagaaaaaataccagggaacaaacaagacatttgttttcacaaatatctctggtcagcctgttatatatcgtccaacaggagtaaaccgctttttcacactgtgcaacactgactacatagcaattggtggaggaggtcattttgcgctttatttggatggtgatctattgaatggttcaagttcagtctcggaaacgtatgggaatccttgccttgcaaattctcaagactttgaagtgaaggaagtagagttatggggctttgtacatgcttcaaaatatgaagaagtacttgcaatgagcaaaacagaagcacccggggtctgccgattytgaatattcaaatggcttgcagttggtatttcattgaatggtcactttccctctggcctctagtgaagtgagcaatgcgaagttcatatgacaatataatggagacatattttatgtatccaattatgttctgactaagcaactaacatatatgtaaatatttaccaagcatgtatatatggagtccctacmcg

SEQ ID NO: 152 - protein, 374 aa, Glycine max
  misc_feature: Ceres CLONE ID no.467151
  misc_feature: Bit score of 227.4 for HMM based on sequences of FIGURE 1.
  misc_feature (214)..(352): Pfam Name: TLD Pfam Description: TLD
  misc_feature: Functional Homolog Of Ceres ANNOT ID no. 826303 at SEQ ID NO. 96
  misc_feature (125)..(125): Xaa is any aa, unknown, or other
  misc_feature (374)..(374): Xaa is any aa, unknown, or other
MGKRQSLRNKATHLVSVLLNPISDSDTSNPKTSKQHPPTPTPTPPSGQVGGSETNDEEGNRGLVDGPDTSSFTAFLYSLLSSSDTGDNANSRVQSDDNKSAAPDHNPLPDSSSLKENGGRKSLIXRSKQSIGKAIRRIGGFRHQDRRDNVEMKLDDGHGSKVSGGVEMRRIEPVTVPLVDLPEISEPSVLLSDSIRNVLYVSLPPLIHGRKWLLLYSTWRHGISLSTLYRRSMLWPGLSLLVVGDKKGAVFGSLVEAPLRSSSKKKYQGTNKTFVFTNISGQPVIYRPTGVNRFFTLCNTDYIAIGGGGHFALYLDGDLLNGSSSVSETYGNPCLANSQDFEVKEVELWGFVHASKYEEVLAMSKTEAPGVCRX

SEQ ID NO: 153 - DNA, 984 bp, Sorghum bicolor
  misc_feature: Ceres ANNOT ID no.6121933
  misc_feature: Encodes the peptide sequence at SEQ ID NO 154
atgctggcgtggaaggagaaggtggcggaccgcctcgctcgcctcctcgccgactcccctgtctccccctccccggcacaggccgccgtcgcgccaccgcaggcaaaatctttcccagcagaaccttttattccccccaagacatcatcattatcttcgtatgtattttccctcctaccaacctcaaacttggggcatgagcagaattcaccttgttctgagactttgagaccattacctcctgaatcacttcctaagaaatggagagggagtaatttaacatggaaagatcctcccctggaattgagtgaggagtctgggtctgaaagtgagagagatgaaaggaatgggaatttcggtagcgaccaggtccttcagtcatacaggtccataaataactcaaatggaaatgaggaaacatcgacttcagattgtgcgggcactcttcgttatctgactgaaaagtctatgtttgtgtctccaaaactatttgcattctttcaatcttctctccctgggaccttgaaggggtgccactgggtattgctatatagcacctggaagcatgggatatctctaagaacacttcttcgtagaagtgagaatattcagggtccatgcctattgattgtcggagatatgcaaggggctgtgtttggtggcttattgaacagtcctctgcggccaacagagaaaaggaaatatcagggaacaaaccagacgtttgtgttcacaacgatacatggtgaacctagacttttcagaccaacgggtgcaaacagattctattatttgtgcttgaatgatgctttagcatttggaggtggtggaagcttcgcattgtgtgttgatgaagatctgttacatggaagcagtggatcatgtgagacatttggaaactcatgcttggcacatagtccagagtttgaactaaagaatgtggagctatggggattcacgcattcatggaaccgttcgacataa

SEQ ID NO: 154 - protein, 327 aa, Sorghum bicolor
  misc_feature: Ceres ANNOT ID no.6121933
  misc_feature: Bit score of 908.0 for HMM based on sequences of FIGURE 1.
  misc_feature (182)..(320): Pfam Name: TLD Pfam Description: TLD
  misc_feature: Functional Homolog Of Ceres ANNOT ID no. 826303 at SEQ ID NO. 96
MLAWKEKVADRLARLLADSPVSPSPAQAAVAPPQAKSFPAEPFIPPKTSSLSSYVFSLLPTSNLGHEQNSPCSETLRPLPPESLPKKWRGSNLTWKDPPLELSEESGSESERDERNGNFGSDQVLQSYRSINNSNGNEETSTSDCAGTLRYLTEKSMFVSPKLFAFFQSSLPGTLKGCHWVLLYSTWKHGISLRTLLRRSENIQGPCLLIVGDMQGAVFGGLLNSPLRPTEKRKYQGTNQTFVFTTIHGEPRLFRPTGANRFYYLCLNDALAFGGGGSFALCVDEDLLHGSSGSCETFGNSCLAHSPEFELKNVELWGFTHSWNRST

SEQ ID NO: 155 - DNA, 1477 bp, Triticum aestivum
  misc_feature: Ceres CLONE ID no.884270
  misc_feature: Encodes the peptide sequence at SEQ ID NO 156
aatccaggaccgtctcaccacctaacggcaaaagaaaagcgcagccgcacccgcacccgcagccaggtccaaatcaagactcctcgccgcaaccactctctctctctcgccggcgtccccccattcaccgccccccgggtagagcgcgaacccccaacccagggggccgcggcgcgtcgccccccgcctaaacttagcggccgctccaggaataggcgcggggcgcgcggggatggggtacctgccgtcgtccctgggcagcaaggcggcgcacttcgtgtccgacctcaccaccgtcatcctcaaccccgtctccgagcgcgagccctcccacctccccgaggaggacgaagagcaagaaaaatcagaagatgacaaagattctgaccataattctgataaccctgacggccccgatacatcttcgttcagagcattcatgatctcatttttgtcgccgtctagctcttttaacgattcaagggagataatccccgagcagagcgaagaaatgggatacccaactttaacaccagttgggaaggcaaccaagggaaagacaggcttgctaagcagagggaagcattccattggaaaaattattaataaagcggctaagatgagcggtttcaaacaaaattcagaacccaaaattgacaaagaggtggtaaataatgctgaatcagttgcacctgcgttggagctcgaaggaccaaatgaagttaattccctgaccaacatgccagctatgtcagagccatctgtccttttgtcagaaacaatgcgatccactctttattcttctcttcctattctggcccaaggaaggagctgggttttgctatacagcacatcgaggcatggaatatctctatctactttatatagaaggagtttgctgtgccctggttactcactcctggtagttggggacagaaagggggcggtttttggtggtctagttgaggctccattacagccaactagcacaaagaagtatcagggtaccaataactgctttgttttcactaatttacacagtgatcctgctatataccgaccaacaggtgccaataagtattatactgtgtgctctgctgactatttggcactaggaggtggaggtcatttcgcactttatctagactcagaccttttgagtggttcaagttcaaattcggagacttttaacaaccagtgtttgtcacattctccagattttgcagttaaagacgttgagctatggggcttcgtctatccttcaaggtacgaagagatgctcaagctctgtcgtactgagaagccaggggtatgccgattttgagtttaccggaccaatgtgtgttacatctgtacagttttaagtaggcgtcgctagaattttagtgtgcaggaccatggtagaagtattggaaagtgagaacttgtcttgtcgagcgagtttgctgagatttataaattctgtaattttcttgtc

SEQ ID NO: 156 - protein, 363 aa, Triticum aestivum
  misc_feature: Ceres CLONE ID no.884270
  misc_feature: Bit score of 207.0 for HMM based on sequences of FIGURE 1.
  misc_feature (203)..(341): Pfam Name: TLD Pfam Description: TLD
  misc_feature: Functional Homolog Of Ceres ANNOT ID no. 826303 at SEQ ID NO. 96
MGYLPSSLGSKAAHFVSDLTTVILNPVSEREPSHLPEEDEEQEKSEDDKDSDHNSDNPDGPDTSSFRAFMISFLSPSSSFNDSREIIPEQSEEMGYPTLTPVGKATKGKTGLLSRGKHSIGKIINKAAKMSGFKQNSEPKIDKEVVNNAESVAPALELEGPNEVNSLTNMPAMSEPSVLLSETMRSTLYSSLPILAQGRSWVLLYSTSRHGISLSTLYRRSLLCPGYSLLVVGDRKGAVFGGLVEAPLQPTSTKKYQGTNNCFVFTNLHSDPAIYRPTGANKYYTVCSADYLALGGGGHFALYLDSDLLSGSSSNSETFNNQCLSHSPDFAVKDVELWGFVYPSRYEEMLKLCRTEKPGVCRF

SEQ ID NO: 157 - protein, 317 aa, Vitis vinifera
  misc_feature: Public GI ID no.147801307
  misc_feature: Bit score of 539.7 for HMM based on sequences of FIGURE 1.
  misc_feature (169)..(307): Pfam Name: TLD Pfam Description: TLD
  misc_feature: Functional Homolog Of Ceres ANNOT ID no. 826303 at SEQ ID NO. 96
MYFKDKLSRFWDDSSSSPSQARPSSKGGRSLSSLLSFVLPSARFDGFRSNKHQPDIRPIRSLPVRWSGKNVRHDPLASPADYSPVCEKKENGESMYKNKGTLDAPEEDEDHGSGRSTSSSDVFEEATELHSSENPAPNLTDNSSFISSDLYEFLLSSLPNIVRGCQWVLLYSTLKHGISLRTLIRKSADLSGPCLLIVGDMQGAVFGGLLECPLKPTAKRKYQGTNQAFVFTTIYGEPRLFRPTGANRYFYLCLNDLLALGGGGNFALCLDEDLLSGTSGPCETFGNLCLAHNPEFELKNVEICREAEASASGTNVS

SEQ ID NO: 158 - DNA, 1633 bp, Panicum virgatum
  misc_feature: Ceres CLONE ID no.1804056
  misc_feature: Encodes the peptide sequence at SEQ ID NO 159
gccgtcccttgccacgggatccccccctcccccccacccacgggcacaggcgcacagcgcgcgcggcgagctctgcgcttccactagccccctctctccaccgatctctcacccaagcacccaaccgccccgcactcgaactcgaactcgaacgccctcgaggctcggcttggttccggcaacgtcggaggagcacggggatggcgatcgggctcccctcgcccgccttcctcacctgaacccttgatcccaccagcgcggcgcgaggggcgcgggcatggggtacctgccggccctgggcgggaaggcggcgcacctggtgtccgacctcgccaccgtcatcctcaaccccgtctccgagcgggagcgccagcggcaccacgcatcccacctcccggaagctgctgaaggaaaagacacactatttggtgatgaagattctgacaaaaattccgagactcctgatggtcctgacacatcttccttcagagcatttctgatgtcatttgtatcatccacaacctccagcaaggattcaatggagaccatacctgagcataatctagacgtggaatatccaactttaacacctgttggaaaggcaagcagtgtgagaaagggcttgctcagtagagggaagcattccattggaaggattattagcaaggcaggactcagtaatttcagacagaaacccacctacagcattgatggtgaattcacaggtcaaacagaatcagttgcacctaggtttgagatgaagggatcaaaggaattggctttgcatgagaagttgccagctatgtccgagccatctgttctgttgtcagaaatgatgcgatctgttctttattcatctcttcctgttcttgttcaaggaaggaactggatgttggtttacagtacctggagacatggaatatctttgtccactctgtatagaaggagcaggctttgtgctggctactcacttctgatagttggggatcgaaggggagcagtttttggtggtttggttgaggccccactgcagcctatcataaagaggaaatatcaggggactaatgaatgctttgtgttcaccaatgtagaaggccgtcctgttatatgccgtccaacaggtgctaataactattttacattttgctcaaatgattatttggcaatgggaggtggtggtcacttcgccctttatctcgatggagacctactgaatggttctagttccacctcagagacttttaacaacccatgcttatcccatacccaggaattcaaaatcaaagatgtcgagctatggggcttcgtcaatgcttcaaaatatgaagagatgctcacgatctgccgcactgaaaagcaaggagtttggaatctgtgaccgtgcggactgcggagctcactgagttgttgatggttggtgccaacctatctcctggtgtggcctgtacagttttgtagtacataaaacgtatgtagaacatgaagaggagagtttcatatggaatagaaatgtgtagagctttgccgttcatgtttgtaaatattaacagtagaagatggtagtgtgtagtactactatatggtaaaaacaatttactttcatctgcattcgaaatcgtataagattgtcgtt

SEQ ID NO: 159 - protein, 366 aa, Panicum virgatum
  misc_feature: Ceres CLONE ID no.1804056
  misc_feature: Bit score of 186.4 for HMM based on sequences of FIGURE 1.
  misc_feature (206)..(344): Pfam Name: TLD Pfam Description: TLD
  misc_feature: Functional Homolog Of Ceres ANNOT ID no. 826303 at SEQ ID NO. 96
MGYLPALGGKAAHLVSDLATVILNPVSERERQRHHASHLPEAAEGKDTLFGDEDSDKNSETPDGPDTSSFRAFLMSFVSSTTSSKDSMETIPEHNLDVEYPTLTPVGKASSVRKGLLSRGKHSIGRIISKAGLSNFRQKPTYSIDGEFTGQTESVAPRFEMKGSKELALHEKLPAMSEPSVLLSEMMRSVLYSSLPVLVQGRNWMLVYSTWRHGISLSTLYRRSRLCAGYSLLIVGDRRGAVFGGLVEAPLQPIIKRKYQGTNECFVFTNVEGRPVICRPTGANNYFTFCSNDYLAMGGGGHFALYLDGDLLNGSSSTSETFNNPCLSHTQEFKIKDVELWGFVNASKYEEMLTICRTEKQGVWNL

SEQ ID NO: 160 - DNA, 1567 bp, Panicum virgatum
  misc_feature: Ceres CLONE ID no.1795473
  misc_feature: Encodes the peptide sequence at SEQ ID NO 161
acgggcacaggcgcacagcgcgcgcggtgagctctgcgcttccactagccccctctctccaccgatctctcacccaagcacccaaccgccccgcactcgaactcgaactcaacgccctcgaggcttggcttggttccggcaacgtcggaggagcacggggatggcgatcgggctcccctcgcccgccttcctcacctgaacccttgatcccaccagcgcggcgcgaggggcgcgggcatggggtacctgccggccctgggcgggaaggcggcgcacctggtgtccgacctcgccaccgtcatcctcaaccccgtctccgagcgggagcgccagcggcaccacgcatcccacctcccggaagctgctgaaggaaaagacacactatttggtgatgaagattctgacaaaaattccgagactcctgatggtcctgacacatcttccttcagagcatttctgatgtcatttgtatcatccacaacctccagcaaggattcaatggagaccatacctgagcataatctagacgtggaatatccaactttaacacctgttggaaaggcaagcagtgtgagaaagggcttgctcagtagagggaagcattccattggaaggattattagcaaggcaggactcagtaatttcagacagaaacccacctacagcattgatggtgaattcacaggtcaaacagaatcagttgcacctaggtttgagatgaagggatcaaaggaattggctttgcatgagaagttgccagctatgtccgagccatctgttctgttgtcagaaatgatgcgatctgttctttattcatctcttcctgttcttgttcaaggaaggaactggatgttggtttacagtacctggagacatggaatatctttgtccactctgtatagaaggagcaggctttgtgctggctactcacttctgatagttggggatcgaaggggagcagtttttggtggtttggttgaggccccactgcagcctatcataaagaggaaatatcaggggactaatgaatgctttgtgttcaccaatgtagaaggccgtcctgttatatgccgtccaacaggtgctaataactattttacattttgctcaactgattatttggcaatgggaggtggtggtcacttcgccctttatctcgatggagacctactgaatggttctagttccacctcagagacttttaacaacccatgcttatcccatacccaggaattcaaaatcaaagatgtcgagctatggggcttcgtcaatgcttcaaaatatgaagagatgctcacgatctgccgcactgaaaagcaaggagtttggaatctgtgaccgtgcggactgcggagctcactgagttgttgatggttggtgccaacctatctcctggtgtggcctgtacagttttgtagtacataaaacgtatgtagaacatgaagaggagagtttcatatggaatagaaatgtgtagagctttgccgttcatgtttgtaaatattaacagtagaagatggtagtgtgtagtactactatatggtaaaaacaatttactttcatctgc

SEQ ID NO: 161 - protein, 366 aa, Panicum virgatum
  misc_feature: Ceres CLONE ID no.1795473
  misc_feature: Bit score of 179.8 for HMM based on sequences of FIGURE 1.
  misc_feature (206)..(344): Pfam Name: TLD Pfam Description: TLD
  misc_feature: Functional Homolog Of Ceres ANNOT ID no. 826303 at SEQ ID NO. 96
MGYLPALGGKAAHLVSDLATVILNPVSERERQRHHASHLPEAAEGKDTLFGDEDSDKNSETPDGPDTSSFRAFLMSFVSSTTSSKDSMETIPEHNLDVEYPTLTPVGKASSVRKGLLSRGKHSIGRIISKAGLSNFRQKPTYSIDGEFTGQTESVAPRFEMKGSKELALHEKLPAMSEPSVLLSEMMRSVLYSSLPVLVQGRNWMLVYSTWRHGISLSTLYRRSRLCAGYSLLIVGDRRGAVFGGLVEAPLQPIIKRKYQGTNECFVFTNVEGRPVICRPTGANNYFTFCSTDYLAMGGGGHFALYLDGDLLNGSSSTSETFNNPCLSHTQEFKIKDVELWGFVNASKYEEMLTICRTEKQGVWNL

SEQ ID NO: 162 - DNA, 1604 bp, Panicum virgatum
  misc_feature: Ceres CLONE ID no.1811977
  misc_feature: Encodes the peptide sequence at SEQ ID NO 163
ctctccgccgtctctcacccaaaatcccccgcactcgaactcgaactcgaacgctctcgactcaggaggctcggcttggctccggcagcgtcggaggaggagaagcacggggatggcgatcgggctcccctcgcctgccttcctgacctgaaccttgatcccaccagcgcagcgcaaggggcgcggggatggggtacctgccggccctgggcgggaaggcggcgcacctggtgtccgacctcgccaccgtcatcctcaaccccgtctccgagcgggagcgccagcggcaccacccctcccacctcccggatgctgctgaaggaaaagacacactatttggtgatgaagattctgacaaaaattccgagactcctgatggtcctgacacatcttccttcagatcatttctgatgtcatttgtttcttccacaacctccagcaaggattcaatggagaccatacctgagcataatctagatgtggaatatccaactttaacacctgttggaaaggcaagcagtgggaggaaaggtttgctcagtagagggaagcattccattggaaggattattaacaaggcaggactcagtaatttcagacagaaacccgcctgcagctttgagggtgaattcacaggtcaaacagaatcagttgcacccaggtttgagatgaagggatcaaaggaatcggctttgcatgataagttgccagctatgtccgaaccatctgttcttttgtcagaaatgatgcgatctgttctttattcatctcttcctgttcttgttcaaggaaggaactggatattggtttacagtacctggagacatggaatatctttgtctactctgtatagaaggagcaggctttgtgctggctactcacttctgatagttggggatcgaagaggagcagtttttggtggtttggttgaggccccactgcagcctatcataaagaggaaatatcaggggactaatgaatgctttgtgttcaccaatgtagaaggccgtcctgttatatgccgtccaacaggtgctaataactattttacattttgctcaactgattatttggcaatgggaggtggtggtcacttcgcactttatctcgatggagaccttctgaatggttctagttccacctcagagacttttaacaatccatgcttatcccatacccaggaattcaaaatcaaagatgtcgagctatggggcttcgtcaatgcttcaaaatatgaagagatgctcactatctgccgcatggaaaaacaaggaatttggaatctgtgactgctgactgcggagctcactgagttgatggttggtgccaaccatcaacgtatgtagaacgtatgtagaacatgaaggggagagtttcatatggaatagaaatgtgaagagctttgccgctcatgtttgtaaatattaacagtagatgttagcgtagtactatatagtaaaaacatctgcattggaaaccatataggactggcaagcgctctgagtgtggtgtttcgcttccccagtgcgtgttgagcagcttattgcttgtgattgtaaccatctttgatctttctgagtaataaataaactctcttctcctcg

SEQ ID NO: 163 - protein, 366 aa, Panicum virgatum
  misc_feature: Ceres CLONE ID no.1811977
  misc_feature: Bit score of 185.1 for HMM based on sequences of FIGURE 1.
  misc_feature (206)..(344): Pfam Name: TLD Pfam Description: TLD
  misc_feature: Functional Homolog Of Ceres ANNOT ID no. 826303 at SEQ ID NO. 96
MGYLPALGGKAAHLVSDLATVILNPVSERERQRHHPSHLPDAAEGKDTLFGDEDSDKNSETPDGPDTSSFRSFLMSFVSSTTSSKDSMETIPEHNLDVEYPTLTPVGKASSGRKGLLSRGKHSIGRIINKAGLSNFRQKPACSFEGEFTGQTESVAPRFEMKGSKESALHDKLPAMSEPSVLLSEMMRSVLYSSLPVLVQGRNWILVYSTWRHGISLSTLYRRSRLCAGYSLLIVGDRRGAVFGGLVEAPLQPIIKRKYQGTNECFVFTNVEGRPVICRPTGANNYFTFCSTDYLAMGGGGHFALYLDGDLLNGSSSTSETFNNPCLSHTQEFKIKDVELWGFVNASKYEEMLTICRMEKQGIWNL

SEQ ID NO: 164 - DNA, 2112 bp, Populus balsamifera subsp. trichocarpa
  misc_feature: Ceres ANNOT ID no.1531521
  misc_feature: Encodes the peptide sequence at SEQ ID NO 165
atggcgcgagggctcatcctgacaacgcaagcgagagccaccaccacttccttcacaacaagactttcagtttcaaaacccaaatgcaaaaaccctcttccttatcgtctccatctaccttcccgtgtatcctcaactcgcttcttttgctgcaaatgttcggtttcccaagacccaatcgtcatcaccgaatacaagcagtctttctctcagcgaatggctatggctggactcaagcctcaccaccgtattgctataggagtatccggtggccctgatagcatggcactttgtttcctaactgctggttggaaaactgatggtgctaatgctgttggcaaaagtgatgatggttttattaatgggattttgggggtaattgttgatcatgggctgcgagaagagagtaatgaggaggcacatattgtttctagtcgagttactgaaatgggaatcagatgtgagattgcaaagtgtagttggttggatgggaagcctaaacaaggtcacttgctagaagaggctcgagagaagaggtatgaagtgttccaaaatgtttgcactaaacatcagattgaagtgttgcttattgcacatcatgcggatgaccaggccgagttgttcattcttagactatctcgcaacagtggcgtgcttggacttgccggcatggcatttacttcgcaaatgttctccaaaagcacccatctttaccgtgaaggttcaaagaacaaagggatactaatagtgagaccactcttgcatttttctaaagaaattttgtacaagatatgtcaagagtctggccaggattgggtggaagatccaacaaatcaaaacacagtatatgctcggaataggattcgaatgtcattaggaaatttgtcatcatataccttccagtctgaactacaaggtgtgatttctgcctgtcgaagaacacgtgcatatgttgaccaaatttgtaataatttgataaatcaggctgtgaccatcatagatcagcatgggtatgccatcatcgatttagagattcttaatccatcaaaagttacagatatatgcctgtcaaagtttgttgcgttgatcttgcagtatgtctctcagaggaacaggcccattagaggaagtacttcaaaattgttgttacactacattcgcactgtcccatgcaagacctcctttacagctgctggatgttacctttgtccagctcctcggtctagggggacaaaaatccttgtttgttgttctgttgattgtcctctgaattcaaaaatggaattgatttacccttttttaaatggagaacaaaagcattatttccgaaatgagttggagcaaattatagctgatggaaaatcatattcaaatcattttgttccagatgcatcagatgtgcattttttagatgcatctgaatcagtcataagtgaagccaaaacactcaacattatcagtgagtcaacctatagagacattcttttactgaagagggaagaaatcaaacatttcaagcataaagttgaagataaggtggactataagtcaaaaaataaggttgaatctatcattgcatccccaagtgaactacttcagcctggaaaagcatgttatttcatgaacaggttctggatcacatggaaactgagcaaccatgtttctgtcggtgaagggacagaaaattgtgttgcggatttaggaggggaaagtcaggaatgccatagctgttcttgcaggattggtcatgacaaggttgctgaggtgcggcgcatgagcgaatctgattggctttatcttgctaagttgtcaaagtgcccaagtttggataacttgcaacagcaaaaagttctttcatccagtacaatggagcaaatatcagagaagagaagcctgcatttggaaaatctggagctatcagcacaaaaagctcttgaagtgttgaaatcgataccagttgctgctagaagaagcctcccagtcctagtcaatcatcaaggacttttacttagcatcccgagtattggcttcaagcactgcccttgtttgatggtgtcttgcgaattcaagccaatagtgccacttgggggaggtcacagctcattcatgtaa

SEQ ID NO: 165 - protein, 629 aa, Populus balsamifera subsp. trichocarpa
  misc_feature: Ceres ANNOT ID no.1531521
  misc_feature: Bit score of 1803.9 for HMM based on sequences of FIGURE 6.
  misc_feature (9)..(217): Pfam Name: ATP_bind_3 Pfam Description: PP-loop family
  misc_feature: Functional Homolog Of Ceres ANNOT ID no. 842015 at SEQ ID NO. 112
MAGLKPHHRIAIGVSGGPDSMALCFLTAGWKTDGANAVGKSDDGFINGILGVIVDHGLREESNEEAHIVSSRVTEMGIRCEIAKCSWLDGKPKQGHLLEEAREKRYEVFQNVCTKHQIEVLLIAHHADDQAELFILRLSRNSGVLGLAGMAFTSQMFSKSTHLYREGSKNKGILIVRPLLHFSKEILYKICQESGQDWVEDPTNQNTVYARNRIRMSLGNLSSYTFQSELQGVISACRRTRAYVDQICNNLINQAVTIIDQHGYAIIDLEILNPSKVTDICLSKFVALILQYVSQRNRPIRGSTSKLLLHYIRTVPCKTSFTAAGCYLCPAPRSRGTKILVCCSVDCPLNSKMELIYPFLNGEQKHYFRNELEQIIADGKSYSNHFVPDASDVHFLDASESVISEAKTLNIISESTYRDILLLKREEIKHFKHKVEDKVDYKSKNKVESIIASPSELLQPGKACYFMNRFWITWKLSNHVSVGEGTENCVADLGGESQECHSCSCRIGHDKVAEVRRMSESDWLYLAKLSKCPSLDNLQQQKVLSSSTMEQISEKRSLHLENLELSAQKALEVLKSIPVAARRSLPVLVNHQGLLLSIPSIGFKHCPCLMVSCEFKPIVPLGGGHSSFM

SEQ ID NO: 166 - DNA, 2238 bp, Populus balsamifera subsp. trichocarpa
  misc_feature: Ceres ANNOT ID no.1478015
  misc_feature: Encodes the peptide sequence at SEQ ID NO 167
atggcgcgagggctcatcctgacaacgcaagcgagagccaccaccacttccttcacaacaagactttcagtttcaaaacccaaatgcaaaaaccctcttccttatcgtctccatctaccttcccgtgtatcctcaactcgcttcttttgctgcaaatgttcggtttcccaagacccaatcgtcatcaccgaatacaagcagtctttctctcagcgaatggctatggctggactcaagcctcaccaccgtattgctataggagtatccggtggccctgatagcatggcactttgtttcctaactgctggttggaaaactgatggtgctaatgctgttggcaaaagtgatgatggttttattaatgggattttgggggtaattgttgatcatgggctgcgagaagagagtaatgaggaggcacatattgtttctagtcgagttactgaaatgggaatcagatgtgagattgcaaagtgtagttggttggatgggaagcctaaacaaggtcacttgctagaagaggctcgagagaagaggtatgaagtgttccaaaatgtttgcactaaacatcagattgaagtgttgcttattgcacatcatgcggatgaccaggccgagttgttcattcttagactatctcgcaacagtggcgtgcttggacttgccggcatggcatttacttcgcaaatgttctccaaaagcacccatctttaccgtgaaggttcaaagaacaaagggatactaatagtgagaccactcttgcatttttctaaagaaattttgtacaagatatgtcaagagtctggccaggattgggtggaagatccaacaaatcaaaacacagtatatgctcggaataggattcgaatgtcattaggaaatttgtcatcatataccttccagtctgaactacaaggtgtgatttctgcctgtcgaagaacacgtgcatatgttgaccaaatttgtaataatttgataaatcaggctgtgaccatcatagatcagcatgggtatgccatcatcgatttagagattcttaatccatcaaaagttacagatatatgcctgtcaaagtttgttgcgttgatcttgcagtatgtctctcagaggaacaggcccattagaggaagtacttcaaaattgttgttacactacattcgcactgtcccatgcaagaatttttggtccaagccgcaagatagcacgggaaataacctagcttatgctaaaatgcaaccatctgattctcccaggacagctttggttctaaattggaaaaaaatatttttgacaatcctgcagacctcctttacagctgctggatgttacctttgtccagctcctcggtctagggggacaaaaatccttgtttgttgttctgttgattgtcctctgaattcaaaaatggaattgatttacccttttttaaatggagaacaaaagcattatttccgaaatgagttggagcaaattatagctgatggaaaatcatattcaaatcattttgttccagatgcatcagatgtgcattttttagatgcatctgaatcagtcataagtgaagccaaaacactcaacattatcagtgagtcaacctatagagacattcttttactgaagagggaagaaatcaaacatttcaagcataaagttgaagataaggtggactataagtcaaaaaataaggttgaatctatcattgcatccccaagtgaactacttcagcctggaaaagcatgttatttcatgaacaggttctggatcacatggaaactgagcaaccatgtttctgtcggtgaagggacagaaaattgtgttgcggatttaggaggggaaagtcaggaatgccatagctgttcttgcaggattggtcatgacaaggttgctgaggtgcggcgcatgagcgaatctgattggctttatcttgctaagttgtcaaagtgcccaagtttggataacttgcaacagcaaaaagttctttcatccagtacaatggagcaaatatcagagaagagaagcctgcatttggaaaatctggagctatcagcacaaaaagctcttgaagtgttgaaatcgataccagttgctgctagaagaagcctcccagtcctagtcaatcatcaaggacttttacttagcatcccgagtattggcttcaagcactgcccttgtttgatggtgtcttgcgaattcaagccaatagtgccacttgggggaggtcacagctcattcatgtaa

SEQ ID NO: 167 - protein, 671 aa, Populus balsamifera subsp. trichocarpa
  misc_feature: Ceres ANNOT ID no.1478015
  misc_feature: Bit score of 1752.8 for HMM based on sequences of FIGURE 6.
  misc_feature (9)..(217): Pfam Name: ATP_bind_3 Pfam Description: PP-loop family
  misc_feature: Functional Homolog Of Ceres ANNOT ID no. 842015 at SEQ ID NO. 112
MAGLKPHHRIAIGVSGGPDSMALCFLTAGWKTDGANAVGKSDDGFINGILGVIVDHGLREESNEEAHIVSSRVTEMGIRCEIAKCSWLDGKPKQGHLLEEAREKRYEVFQNVCTKHQIEVLLIAHHADDQAELFILRLSRNSGVLGLAGMAFTSQMFSKSTHLYREGSKNKGILIVRPLLHFSKEILYKICQESGQDWVEDPTNQNTVYARNRIRMSLGNLSSYTFQSELQGVISACRRTRAYVDQICNNLINQAVTIIDQHGYAIIDLEILNPSKVTDICLSKFVALILQYVSQRNRPIRGSTSKLLLHYIRTVPCKNFWSKPQDSTGNNLAYAKMQPSDSPRTALVLNWKKIFLTILQTSFTAAGCYLCPAPRSRGTKILVCCSVDCPLNSKMELIYPFLNGEQKHYFRNELEQIIADGKSYSNHFVPDASDVHFLDASESVISEAKTLNIISESTYRDILLLKREEIKHFKHKVEDKVDYKSKNKVESIIASPSELLQPGKACYFMNRFWITWKLSNHVSVGEGTENCVADLGGESQECHSCSCRIGHDKVAEVRRMSESDWLYLAKLSKCPSLDNLQQQKVLSSSTMEQISEKRSLHLENLELSAQKALEVLKSIPVAARRSLPVLVNHQGLLLSIPSIGFKHCPCLMVSCEFKPIVPLGGGHSSFM

SEQ ID NO: 168 - protein, 456 aa, Arabidopsis thaliana
  misc_feature: Public GI ID no.42572525
  misc_feature: Bit score of 1148.0 for HMM based on sequences of FIGURE 6.
  misc_feature (2)..(89): Pfam Name: ATP_bind_3 Pfam Description: PP-loop family
  misc_feature: Functional Homolog Of Ceres ANNOT ID no. 842015 at SEQ ID NO. 112
MQAELFILRLSRSSGVLGLAGTAFASEIFSRNLQLDAKHMKNQSIRLVRPLLDLWKEDMYKICQWGRQDWVEDPTNRSQLFVRNRIRTSIGNLESGNFKSELQAVISECRRTRSFVDKVCTDLIHQTVTVTDKGYAILDLERLNPSGVKDICLSKYLFAVLQFISQRQRPIRGNTSKLLLNYIRAIPCRTSLTAAGCYLSPAPGSKGTKIIVSCSVDCPLPSKTELLNISFNETPSDDLGQIIADAKSFSDHVAPTSLFEVQFLDVASESVLSKARELNLLSESTYTTIGLLQRDETKRFLTKTEEKSVELEHGTNIAASSDKVHLCLGQNLYFMNRFLIRWNLSDHQCNEADCRNCPVSTATSMEVRHMVEPDWLYLAELSKCSTSNHSISSSQKALRSLKLIPAAARKSLPVLVNHCGLLLCIPAIGFSYCSCLEASAVFLPRIPLGGGHSSFL

SEQ ID NO: 169 - protein, 660 aa, Arabidopsis thaliana
  misc_feature: Public GI ID no.42572523
  misc_feature: Bit score of 1555.7 for HMM based on sequences of FIGURE 6.
  misc_feature (86)..(293): Pfam Name: ATP_bind_3 Pfam Description: PP-loop family
  misc_feature: Functional Homolog Of Ceres ANNOT ID no. 842015 at SEQ ID NO. 112
MARGLSLCSNGRKSSTLLSNSIPRVSISFSPKTLFTCSYPLQSRHPKFSQRLFCNHACVPETVDETRYKELFNKRMDMAGLKPHNRIALGVSGGPDSMALCVLTAKWKTEGLSCVNKTDGFIDGLVAIVVDHGLRQESKDEAELVCSRVSQMGIRCEIASCDWVDGRPKLGHLQEAAREMRYEMISNVCFRQQIEVLLIAHHADDQAELFILRLSRSSGVLGLAGTAFASEIFSRNLQLDAKHMKNQSIRLVRPLLDLWKEDMYKICQWGRQDWVEDPTNRSQLFVRNRIRTSIGNLESGSFKSELQAVISECRRTRSFVDKVCTDLIHQTVTVTDKGYAILDLERLNPSGVKDICLSKYLFAVLQFISQRQRPIRGNTSKLLLNYIRAIPCRTSLTAAGCYLSPAPGSKGTKIIVSCSVDCPLPSKTELLNISFNETPSDDLGQIIADAKSFSDHVAPTSLFEVQFLDVASESVLSKARELNLLSESTYTTIGLLQRDETKRFLTKTEEKSVELEHGTNIAASSDKVHLCLGQNLYFMNRFLIRWNLSDHQCNEADCRNCPVSTATSMEVRHMVEPDWLYLAELSKCSTSNHSISSSQKALRSLKLIPAAARKSLPVLVNHCGLLLCIPAIGFSYCSCLEASAVFLPRIPLGGGHSSFL

SEQ ID NO: 170 - protein, 662 aa, Arabidopsis thaliana
  misc_feature: Public GI ID no.19071761
  misc_feature: Bit score of 1513.9 for HMM based on sequences of FIGURE 6.
  misc_feature (86)..(293): Pfam Name: ATP_bind_3 Pfam Description: PP-loop family
  misc_feature: Functional Homolog Of Ceres ANNOT ID no. 842015 at SEQ ID NO. 112
MARGLSLCSNGRKSSTLLLNSIPRVSISFSPKTLFTCSYPLQSRHPEFSQRLFCNHACVPETVDETRYKELFNKRMDMAGLKPHNRIALGVSGGPDSMALCVLTAKWKTQGLSCVNKTDGFIDGLVAIVVDHGLRQESKDEAELVCSRVSQMGIRCEIASCDWVDGRPKLGHLQEAAREMRYEMISNVCFRQQIEVLLIAHHADDQAELFILRLSRSSGVLGLAGTAFASEIFSRNLQLDAKHMKNQSIRLVGPLLDFWKEDMYKICQWGRQDWVEDPTNRSQLFVRNRIRTSIGNLQSGSFKSELQAVISECRRTRSFVDKVCTDLIHQTVTATDKGYAILDLERLNPSGVKDICLSKYLSAVLQFISQRQRPIRGNTSKLLLNYIRAIPCRTSLTAAGCYLSPAPGSKGTKIIVSCSVDCPLPSKTELLNISFNETPSDDLGQIIADAKSFSDHVAPTSLFEVQFLDVASESVLSKARELNLLSESTYTTIGLLQRDETKRFLTKTEEKSVELEHGINIPASSDKVHLCLGQNLYFMNRFLIRWNLSDHQCNEAGCRNCPVSTATSMEVRHMVESDWLYLGELSKCSTSNHSISSSQKALRSLKLIPAAARKSLPVLINHCGLLLCIPAIGFSYCSCLEASAVFLPRVPLGGGSSLISLV

SEQ ID NO: 171 - protein, 614 aa, Arabidopsis thaliana
  misc_feature: Public GI ID no.9294051
  misc_feature: Bit score of 1392.1 for HMM based on sequences of FIGURE 6.
  misc_feature (56)..(263): Pfam Name: ATP_bind_3 Pfam Description: PP-loop family
  misc_feature: Functional Homolog Of Ceres ANNOT ID no. 842015 at SEQ ID NO. 112
MEESLRLYSQTPSLGFQFPFLLKPFSLVHIHFNPATQNSHNDCSVITPVSRRLWTKRALGVSGGPDSMALCVLTAKWKTEGLSCVNKTDGFIDGLVAIVVDHGLRQESKDEAELVCSRVSQMGIRCEIASCDWVDGRPKLGHLQEAAREMRYEMISNVCFRQQIEVLLIAHHADDQAELFILRLSRSSGVLGLAGTAFASEIFSRNLQLDAKHMKNQSIRLVRPLLDLWKEDMYKICQWGRQDWVEDPTNRSQLFVRNRIRTSIGNLESGSFKSELQAVISECRRTRSFVDKVCTDLIHQTVTVTDKGYAILDLERLNPSGVKDICLSKYLFAVLQFISQRQRPIRGNTSKLLLNYIRAIPCRTSLTAAGCYLSPAPGSKGTKIIVSCSVDCPLPSKTELLNISFNETPSDDLGQIIADAKSFSDHVAPTSLFEVQFLDVASESVLSKARELNLLSESTYTTIGLLQRDETKRFLTKTEEKSVELEHGTNIAASSDKVHLCLGQNLYFMNRFLIRWNLSDHQCNEADCRNCPVSTATSMEVRHMVEPDWLYLAELSKCSTSNHSISSSQKALRSLKLIPAAARKSLPVLVNHCGLLLCIPVCEITILNHLFCRI

SEQ ID NO: 172 - protein, 272 aa, Dioscorea oppositifolia
  misc_feature: Public GI ID no.46917479
  misc_feature: Bit score of 609.8 for HMM based on sequences of FIGURE 5.
  misc_feature (35)..(261): Pfam Name: Carb_anhydrase Pfam Description: Eukaryotic-type carbonic anhydrase
  misc_feature: Functional Homolog Of Ceres CLONE ID no. 97982 at SEQ ID NO. 114
MSSSTLFHLFLLSSLLFSCLSNARPDEDDFSYIEGSPNGPENWGNLNPEWKTCGNGMEQSPINLCDDRVIQTPALGKLRTSYQAARATLKNNGHDIMVNFKSDAGSQFINQVRYQLKRIHFHSPSEHVLNGERFDLEVQMVHESQDQRRAVTAILFRFGRSDPFLSDLEDFISQISKSEKNEVDAGVVDPRQLLQFDDPAYYRYMGSFTAPPCTEDITWTVIKKLGTVSPRQVLMLKQAVNENAINNARPLQPLKFRTIFFYPRQKSNHDAI

SEQ ID NO: 173 - protein, 274 aa, Nicotiana langsdorffii x Nicotiana sanderae
  misc_feature: Public GI ID no.75298155
  misc_feature: Bit score of 625.3 for HMM based on sequences of FIGURE 5.
  misc_feature (39)..(265): Pfam Name: Carb_anhydrase Pfam Description: Eukaryotic-type carbonic anhydrase
  misc_feature: Functional Homolog Of Ceres CLONE ID no. 97982 at SEQ ID NO. 114
MRMAAITKMLFISFLFLSSVFLARSGEVDDESEFSYDEKSENGPANWGNIRPDWKECSGKLQSPIDIFDLRAEVVSNLRILQKDYKPSNATLLNRGHDIMLRLDDGGYLKINETQYQLKQLHWHTPSEHTINGERFNLEAHLVHESNNGKFVVIGIVYEIGLWPDPFLSMIENDLKVPANKKGIERGIGIIDPNQIKLDGKKYFRYIGSLTTPPCTEGVVWIIDRKVKTVTRRQIKLLQEAVHDGFETNARPTQPENERYINSTYHSFGIEKQQ

SEQ ID NO: 174 - protein, 690 aa, Oryza sativa subsp. indica
  misc_feature: Public GI ID no.125538901
  misc_feature: Bit score of 2015.1 for HMM based on sequences of FIGURE 6.
  misc_feature (71)..(258): Pfam Name: ATP_bind_3 Pfam Description: PP-loop family
  misc_feature: Functional Homolog Of Ceres ANNOT ID no. 842015 at SEQ ID NO. 112
MMPLLLLLLLPVRSAPLRRLLLCRCSSSSSSAAAASASSSACPVPASSVLAPYHRAFARRMALAGVHPHHRVAVGVSGGPDSMALCVLAAAWKKAGEGREQEDEGEGGVSGFVDGLLGVVVDHGLRPESADEAQLVRDRVRGMGVVCEIATCEWPNGRPKLGHIQEAAREMRYQKLLDICIKQRIAVLLIAHHSDDQAELFVLRLSRNSGVLGLAGTAFVSQLFAPNLKYDGDNFSRYGVILVRPMLEFSKDDMYKLLLIDLSYLVLHRYVKEVIICGLKIQLIIVCCTFQSELHKLIYACRLTRAFIDNACSMVLKKSLTIMEHGYAVIDLEKLDPHNVDDLFLSRYLAYVLQFVSQRHRPLRGRSAQLLIDYIRTIPCKAALSVAGCYLCAVPRSKGTKVLVCCSVDLMESSSVHMSYKCSYVKQPPPVSEINQIVTEARIYSDQFRQNCPNTPFPSSKFSTDVLNKAKDLKLIGDCTLEKLNYLQTDEHQKFITTKEHGQEQYLEKTSFPYLEVLNLWPGETCHFMGRFLITWRTSEVVVNGMCLHDSQKHTCQYCMVNQDGSLAIRHMFDTDWLFLAEVCKIHSLEENKNYSNALCDKLEDAKLVQHSRYLQLSAMKSLQILRSIPAPARRMLPVLTNSQGAVLSIPCQPGVAEAIATFGTRQVEMKVPLDHCEGNFVSAGGGSSA

SEQ ID NO: 175 - protein, 689 aa, Oryza sativa subsp. japonica
  misc_feature: Public GI ID no.125581583
  misc_feature: Bit score of 2017.6 for HMM based on sequences of FIGURE 6.
  misc_feature (70)..(257): Pfam Name: ATP_bind_3 Pfam Description: PP-loop family
  misc_feature: Functional Homolog Of Ceres ANNOT ID no. 842015 at SEQ ID NO. 112
MMPLLLLLLPVRSAPLRRLLLCRCSSSSSPAAAASASSSACPVPASSVLAPYHRAFARRMALAGVHPHHRVAVGVSGGPDSMALCVLAAAWKKAGEGREQEDEGEGGVSGFVDGLLGVVVDHGLRPESADEAQLVRDRVRGMGVVCEIATCEWPNGRPKLGHIQEAAREMRYQKLLDICIKQRIAVLLIAHHSDDQAELFVLRLSRNSGVLGLAGTAFVSQLFAPNLKYDGDNFSRYGVILVRPMLEFSKDDMYKLLLIDLSYLVLHRYVKEVIICGLKIQLIIVCCTFQSELHKLIYACRLTRAFIDNACSMVLKKSLTIMEHGYAVIDLEKLDPHNVDDLFLSRYLAYVLQFVSQRHRPLRGRSAQLLIDYIRTIPCKAALSVAGCYLCAVPRSKGTKVLVCCSVDLMESSSVHMSYKCSYVKQPPPVSEINQIVTEARIYSDQFRQNCPNTPFPSSKFSTDVLNKAKDLKLIGDCTLEKLNYLQTDEHQKFITTKEHGQEQYLEKTSFPYLEVLNLWPGETCHFMGRFLITWRTSEVVVNGMCLHDSQKHTCQYCMVNQDGSLAIRHMFDTDWLFLAEVCKIHSLEENKNYSNALCDKLEDAKLVQHSRYLQLSAMKSLQILRSIPAPARRMLPVLTNSQGAVLSIPCQPGVAEAIATFGTRQVEMKVPLDHCESNFVSAGGGSSA

SEQ ID NO: 176 - DNA, 1005 bp, Sorghum bicolor
  misc_feature: Ceres ANNOT ID no.6007789
  misc_feature: Encodes the peptide sequence at SEQ ID NO 177
atggcggacaagccgagccgcgcgctggtcctctacgccgccggccacgccacggtgctcactcccccggcgggctccgcagccgcggggagccacctcgacgcgttcgcctcccgcgcctcctgcggccttctcaccctccgctccccgccggcttcccatcccacgaccggcgcggaggataatagcagcacgattctggagctggcgcagttgctcgacgtttatgatcatctctaccccggaaagaatgcggatagtggtcaagaagttgcccaagtggatccacaggagctagtggttcccaagctgtctgagaggtttatgggcctgagagctgccttggtcaccagttgtccccgcgtcagctcctttgcggcgaatcttggtttccaagtttttcagaccaatgatttcgcccctcaatctgcctcatccggcgttactaaagaggttggattaatcaaccgagcatttgatctgcttggattctcggatgggaatgtgcaggaaacatctgagttcgatctagttttcatgcatgttgccatggagaacacaagcagcaagttaggaaaattaggaatgaagacagatctcaatcggctggagaaattagttggtgcagtcatggaatctgcgcctgttggttcagctattgcttcacgtattcatgtatctgtcattttgagctatgggtctgcttctggaaataaggatgagttttccctattaacctcttcgaccgaagcagattcagacttgaatctactgcgcccacgccagagctacacaatgaaagcaggacatacattagatgatgtcagacttcatcatccaattctactggcacagtggcaggaaggagttacacgtgttgatttggctaaagggttttcttttgaggagtttataaagcatggtggaaaccttgctatgcttgctgagcgctttctacatgaggtggcatttaagctctggaaagcacccaaatatggggcttga

SEQ ID NO: 177 - protein, 334 aa, Sorghum bicolor
  misc_feature: Ceres ANNOT ID no.6007789
  misc_feature: Bit score of 345.9 for HMM based on sequences of FIGURE 4.
  misc_feature: Functional Homolog Of Ceres ANNOT ID no. 851745 at SEQ ID NO. 128
MADKPSRALVLYAAGHATVLTPPAGSAAAGSHLDAFASRASCGLLTLRSPPASHPTTGAEDNSSTILELAQLLDVYDHLYPGKNADSGQEVAQVDPQELVVPKLSERFMGLRAALVTSCPRVSSFAANLGFQVFQTNDFAPQSASSGVTKEVGLINRAFDLLGFSDGNVQETSEFDLVFMHVAMENTSSKLGKLGMKTDLNRLEKLVGAVMESAPVGSAIASRIHVSVILSYGSASGNKDEFSLLTSSTEADSDLNLLRPRQSYTMKAGHTLDDVRLHHPILLAQWQEGVTRVDLAKGFSFEEFIKHGGNLAMLAERFLHEVAFKLWKAPKYGA

SEQ ID NO: 178 - DNA, 1346 bp, Triticum aestivum
  misc_feature: Ceres CLONE ID no.842076
  misc_feature: Encodes the peptide sequence at SEQ ID NO 179
gacggagcgagaagggaaaggggaaggggaagcagtgtgtgtcggcgcggcggagcaatggcggacaagccgagccgggcgctggtgctctacgccgccggccacgcggcgctgctcgccgggggcggaggggggaagggccacctcgacgcgttcgcctccatcgcctcctgcggcttcctctccgtccgcacccccgccgtcaacgaggatggaggggacaagaacagcgacacgattctcgagctggcgcagctcctcgacgtgtacgatgccctctaccctgccaaggatggggaaactgcccgggtggatccgcaggagctagtagtccccaagctatccgagaggttcatggggctgagagccgctatggtcaccaattgccccggtgttagttcattcgcggcgaatcttggcttccacgttttcggaactgaggattttgccgcacggtccggttcaggcagcagttctaaggacgctagaataatcgaccgggcgttcgctctgctgggatttgcggaggggaatgtccaggacacatccgagtttgatctggtgtttgtgcatgccgcaatggagaacacagccggcaagctggggaaattagggatgaagacggatctcaaccggcttgacaaactggtggcttccgtgatggaagctgcgccggtcggttcagctgtcgccgcccgtattcatgtgtctgttgtcttgagctatggatctgctacagaaaataaggaagaggcgtgcctcatcttgaactcttcaaccgaaactgattccgacttgaagttactccgtccacgccagagctacactatgaaagaaggaaagacgttggatgatgtcaggaatcatcatccgatgctattggcacagtggcagcaaggagtaacacgttctgatttggccaaagagttctcttttgaggaatttataaagcgtgccggaaacttcgctatgcttgccgagcgctttctacatgaggttgcatttaagctctggaaagcgccaaaatatggagcatagttctatctgaggaggttctctcttaataaggcgtggaatcacctaataaaaggggtgctacacaagtacttctttcaaatgggtactgcggcagatattgcaaatagatgagttctgtactctcctaaggttctcatttggtatcacccatgctccatgccaacgatgccgtggtactgggaactcataggctcattaccagtagtagttactcacttagtggagatctgttgtgagcctctctaacgctttccttttgtgaaacaatgccatcattcgcagctttgcttgaaatttcttaacgtgac

SEQ ID NO: 179 - protein, 326 aa, Triticum aestivum
  misc_feature: Ceres CLONE ID no.842076
  misc_feature: Bit score of 347.9 for HMM based on sequences of FIGURE 4.
  misc_feature: Functional Homolog Of Ceres ANNOT ID no. 851745 at SEQ ID NO. 128
MADKPSRALVLYAAGHAALLAGGGGGKGHLDAFASIASCGFLSVRTPAVNEDGGDKNSDTILELAQLLDVYDALYPAKDGETARVDPQELVVPKLSERFMGLRAAMVTNCPGVSSFAANLGFHVFGTEDFAARSGSGSSSKDARIIDRAFALLGFAEGNVQDTSEFDLVFVHAAMENTAGKLGKLGMKTDLNRLDKLVASVMEAAPVGSAVAARIHVSVVLSYGSATENKEEACLILNSSTETDSDLKLLRPRQSYTMKEGKTLDDVRNHHPMLLAQWQQGVTRSDLAKEFSFEEFIKRAGNFAMLAERFLHEVAFKLWKAPKYGA

SEQ ID NO: 180 - protein, 337 aa, Oryza sativa subsp. japonica
  misc_feature: Public GI ID no.115444077
  misc_feature: Bit score of 354.6 for HMM based on sequences of FIGURE 4.
  misc_feature: Functional Homolog Of Ceres ANNOT ID no. 851745 at SEQ ID NO. 128
MADKPSRGLVLYAAGHAALLPPASGGGGGAGGGGGGSHLDAFASLASCGFLSLRSPPLASGEEKRDSTILELAQLLDVYDDLFPAKTEKTGQETAQVDPLQLAVPKLSERFMGIRAAMVTNCPLVSSFAANLGFHVSGTEDLVAQSGSSAASKEAGIISQALSLLGFSEGNVQETSEFDLVFLHVAMENTNSKLGKLGMKTDLNRLDKLVGAIMEAAPISSAIASRILVSVMLSYGSAAENKDEFSISKSSTEIDSDLNLLRPRQSYTMKAGNTLDDVRNHHPILLAQWQEGVTRSDLTEGFSFEEFIKRGGNLAMLAERFLHEVAFKLWKAPKYGA

SEQ ID NO: 181 - protein, 396 aa, Zea mays
  misc_feature: Ceres CLONE ID no.258034
  misc_feature: Bit score of 1110.6 for HMM based on sequences of FIGURE 7.
  misc_feature (84)..(171): Pfam Name: adh_short Pfam Description: short chain dehydrogenase
MALQAATSFLPSALSARKEGSVKDSASFLGVRLAADGLKLDTTALGLRTVRVSRSADIRAQTAAVSSPSVTPASPSGKKTLRKGTAVITGASSGLGLATAKALAETGKWHVIMACRDFLKASRAAKAAGMDKDSFTVVHLDLASLDSVRQFVRNVRQLEMPIDVVVCNAAVYQPTAKEPSYTADGFEMSVGVNHLGHFLLARELLSDLQSSDYPSKRLIIVGSITGNTNTLAGNVPPKANLGDLRGLAGGLNGVGSSVMIDGGEFDGAKAYKDSKVCNMLTMQEFHRRYHEETGVTFASLYPGCIATTGLFREHIPLFRLLFPPFQKYITKGYVSEEEAGKRLAQVVSDPSLTKSGVYWSWNKNSASFENQLSEEASDADKAKKLWEISEKLVGLA

SEQ ID NO: 182 - protein, 397 aa, Chlamydomonas reinhardtii
  misc_feature: Public GI ID no.10720232
  misc_feature: Bit score of 944.9 for HMM based on sequences of FIGURE 7.
  misc_feature (86)..(173): Pfam Name: adh_short Pfam Description: short chain dehydrogenase
  misc_feature: Functional Homolog Of Ceres CLONE ID no. 258034 at SEQ ID NO. 181
MALTMSAKSVSARAQVSSKAQAAPAVAVSGRTSSRVMPAPALAARSSVARTPLVVCAATATAPSPSLADKFKPNAIARVPATQQKQTAIITGASSGLGLNAAKALAATGEWHVVMACRDFLKAEQAAKKVGMPAGSYSILHLDLSSLESVRQFVQNFKASGRRLDALVCNAAVYLPTAKEPRFTADGFELSVGTNHLGHFLLTNLLLDDLKNAPNKQPRCIIVGSITGNTNTLAGNVPPKANLGDLSGLAAGVPAANPMMDGQEFNGAKAYKDSKVACMMTVRQMHQRFHDATGITFASLYPGCIAETGLFREHVPLFKTLFPPFQKYITKGYVSEEEAGRRLAAVISDPKLNKSGAYWSWSSTTGSFDNQVSEEVADDSKASKLWDISAKLVGLSA

SEQ ID NO: 183 - DNA, 1445 bp, Gossypium hirsutum
  misc_feature: Ceres CLONE ID no.1832498
  misc_feature: Encodes the peptide sequence at SEQ ID NO 184
ccttttagcttcaatttggtgggttctttggtttacttttcaagggtttctctcttcaaaaaaaccctcgagaaatctatgcgctacacagccatttcaaagtggtacatacatggctctacaagctgctgctttggttccatctactttctctgtaccaaaagagggaaagtctggtgcttctttcaaggattcatctctctttggagtgtcactttctgatcacatcaaagctgacttcacctcttctgcttcaagatgcaagagggaattcaaccatagaattggggctgtcagagcccaaacaacagccactgcaacaccagcaatcaccagatctacagtggatggaaagaaaacactaagaaagggtagtgtgatcatcaccggtgcctcctctggattgggtttagccactgcgaaggccttggctgaaactgggaaatggcatgttataatggcttgcagggactttctcaaggctgagagagctgctaagtctgctggaatgtcaaaagaaaactacaccattatgcatttagaccttgcctccctcgacagtgtccgacaattcgtcgatagctacaagcgatcaggccgacctcttgatgtacttgtttgcaatgctgctgtttatcaaccaactgccaaggaacccactttcactgctgaaggatttgaacttagtgtggggactaatcacctcggtcacttccttctttcgcggttattgctcgatgatttgaagcaatccgattatccatcgaaacgcctcatcatcgtcggttccataacaggaaacacaaatacattggccggtaatgtacctccgaaggcaaaccttggggatctaagaggacttgcaggtggactaaatggactgaacagctctgccatgattgatggtggagattttgatggtgccaaagcatacaaggacagcaaagtctgcaatatgctcactatgcaagaattccataggcgtttccatgaggaaaccggcattacattcgcttcattgtaccctggttgcatagctaccaccggcttgttcagggagcacattcctttgttcaggctcctcttccctccattccagaagtacatcaccaaggggttcgtctccgaagaggaagccggaaaaagactcgctcaggtcgtgagcgatcctagcttgacgaaatctggtgtttactggagctggaacaaggattcggcttcattcgagaaccagttatctcaagaagctagtgatcaagataaagcacgcaaaatatgggagcttagtgagaaactcgttggcttggcctaaatttagagccttgaatgctttgcggcagaactttgataatggcttaagggtcttatctgatcccattgatgagtgtagatgactttgtgagttgcagtttgtcaataaaaaatttactcaccccaatttgcgg

SEQ ID NO: 184 - protein, 399 aa, Gossypium hirsutum
  misc_feature: Ceres CLONE ID no.1832498
  misc_feature: Bit score of 1157.5 for HMM based on sequences of FIGURE 7.
  misc_feature (87)..(209): Pfam Name: adh_short Pfam Description: short chain dehydrogenase
  misc_feature: Functional Homolog Of Ceres CLONE ID no. 258034 at SEQ ID NO. 181
MALQAAALVPSTFSVPKEGKSGASFKDSSLFGVSLSDHIKADFTSSASRCKREFNHRIGAVRAQTTATATPAITRSTVDGKKTLRKGSVIITGASSGLGLATAKALAETGKWHVIMACRDFLKAERAAKSAGMSKENYTIMHLDLASLDSVRQFVDSYKRSGRPLDVLVCNAAVYQPTAKEPTFTAEGFELSVGTNHLGHFLLSRLLLDDLKQSDYPSKRLIIVGSITGNTNTLAGNVPPKANLGDLRGLAGGLNGLNSSAMIDGGDFDGAKAYKDSKVCNMLTMQEFHRRFHEETGITFASLYPGCIATTGLFREHIPLFRLLFPPFQKYITKGFVSEEEAGKRLAQVVSDPSLTKSGVYWSWNKDSASFENQLSQEASDQDKARKIWELSEKLVGLA

SEQ ID NO: 185 - DNA, 1488 bp, Gossypium hirsutum
  misc_feature: Ceres CLONE ID no.1846862
  misc_feature: Encodes the peptide sequence at SEQ ID NO 186
atatatgcaacactggaaagctgtttttctaagcccaccatagccacagctcatttaagtgtcttaaataacccatttcaaagttggtaatggctttgcagactgctgctttggttccagctactttcaccctacctaaagagggaaaatcaagtccatctttcaaggattcaactttctttggggtctcactttctgaacatgccaaagctgatttcagctcttctgcattaagatgcaagagggaattcaacccaagaaatggagctgtgagagccgaaacaacagctactgcaactccagcaatcagcagatctgcggtggatggcaagaaaactctaagaaagggtagtgttatcatcaccggtgcctcctccggattgggtttagccactgctaaagccctggctgaaactgggaaatggcatattatcatggcttgcagggactttctcaaggctgaaagagctgcaaagtctgctggcatgtctaaacaaaactacaccatcatgcacttagatctcgcctcattggacagcgtccgccaattcgtcgaccgttacaagcgatcggggaggcctcttgatgtgcttgtttgcaatgctgctgtttaccagccaactgccaaggaaccctctttcacagctgaaggatttgagcttagtgtgggaactaaccatcttggtcactttcttctttcccggttgttgcttgatgacctgaagcagtctgattatccttcaaagcgtctcattatcgttggttcgattacaggaaacacgaataccttggccggaaacgtacctcccaaggccaaccttggggatctaaggggacttgcagggggactaaatgggcttaatagctcaaccatgattgatggtggggaatttgatggtgccaaggcatacaaggatagcaaagtctgcaatatgctcacgatgcaagagttccacaggcggttccatgaggaaagcggcatcacattcgcttccctttacccgggttgcatagctacgacaggcttgttccgggagcacattccgttgttccgactcctcttccctccattccagaagtacatcatcaagggctttgtctccgaagacgaagctggaaaaagactagctcaggttgtgagcgatccgagcttgacaaaatcgggtgtatactggagctggaaccagaattcggcttcattcgagaaccagttgtctcctgaagccagtgatgaggagaaagcacgcaaaatatgggagctcagtgagaaacttgtggggttggcctaaaaatttggaggcatgagatgagatggttgccacttgaatctttgcttatatattgcgcagggtctgatctaattgattgagtgtagagcttggatttggatggtgtgcttgctgttgttaaaatttcttcttttgtagaatgcaggtgattggccttagtcaatatggaatttgtgcaatgcaaaagtaataagttgcc

SEQ ID NO: 186 - protein, 399 aa, Gossypium hirsutum
  misc_feature: Ceres CLONE ID no.1846862
  misc_feature: Bit score of 1121.9 for HMM based on sequences of FIGURE 7.
  misc_feature (87)..(209): Pfam Name: adh_short Pfam Description: short chain dehydrogenase
  misc_feature: Functional Homolog Of Ceres CLONE ID no. 258034 at SEQ ID NO. 181
MALQTAALVPATFTLPKEGKSSPSFKDSTFFGVSLSEHAKADFSSSALRCKREFNPRNGAVRAETTATATPAISRSAVDGKKTLRKGSVIITGASSGLGLATAKALAETGKWHIIMACRDFLKAERAAKSAGMSKQNYTIMHLDLASLDSVRQFVDRYKRSGRPLDVLVCNAAVYQPTAKEPSFTAEGFELSVGTNHLGHFLLSRLLLDDLKQSDYPSKRLIIVGSITGNTNTLAGNVPPKANLGDLRGLAGGLNGLNSSTMIDGGEFDGAKAYKDSKVCNMLTMQEFHRRFHEESGITFASLYPGCIATTGLFREHIPLFRLLFPPFQKYIIKGFVSEDEAGKRLAQVVSDPSLTKSGVYWSWNQNSASFENQLSPEASDEEKARKIWELSEKLVGLA

SEQ ID NO: 187 - DNA, 1456 bp, Gossypium hirsutum
  misc_feature: Ceres CLONE ID no.1836128
  misc_feature: Encodes the peptide sequence at SEQ ID NO 188
aatccaacaaacaacatcagtatacccatcagattagcttagcagtagcgggttcatggctctccaagcagcttcatcgctcccacccaccatctccattcacaaagaggccaaatctaatgcttgtcttaaagagacaactctgtttggtgttccattttcaacccatttcagctttcctcttcatttaactcaggaactcaggaaaaagggagtagctgccggaattgttcgagcacaaacagctgctacaactccggcagtcgatcgggctgctccacaagggaagaagaccttgagaaagggtaatgtgataataaccggtgcgtcgtccggtttaggcttagcgacggccaaggctcttgccgagacaggggaatggcatgtaatcatggcgtgtagaaattttctcaaggctgagaaagctgctaaatcggttggcattacgaaggagaattattccgtgatgcatttggaccttgcgtcgcttgaaagtgtgcggcaatttgcgaataccttccgtcgctcgggcaggccgcttgatgctttggtttgcaatgctgctgtgtacttgccaactgctaaggaaccgacttataccgccgaagggttcgaactcagcgtcggaacaaaccatctcggtcatttcctcctagcaaggctactcctagatgacctcaagcagtcagattatccttataagcgtctcattattgttggttcaattacaggaaacacaaacacattggccgggaatgtgccaccgaaagctaacctcggggaccttagaggtcttgcaggaggcttgaatggaatacagagttcagccatgatagatggaggagattttgatggtgccaaggcatataaagacagcaaagtttgtaatatgctcaccatgcaagaattccacaggcggtaccacgaggaaaccggaatcacctttgcctccctttaccccggttgcattgcaacaacaggtctgtttagggaacacattccattgttccgtcttctcttcccaccgtttcaaaagtacattacgaaaggctatgtttcggaagaagaagctgggggcagacttgcacaggtcaattaaaacatgtcattctatgtttacatgtacagttataaaatacttacttacatagttgcatatgaaccaaacaagcattttctgttgcaggttgtgagtgatccaagtcttacaaaatcaggtgtttactggagttggaacaagaactcagaatcatttgaaaaccagctttcaaaagaggcaagcgacgcggagaaggcacggaagttgtgggaggttagcgagaagttggttggtttggcttaaataggcaccgaaatgagaatatatagacaaactataaatataatttacctatgtttccaattttgtaaatgctacaggttttgttcttaattacaaaacacagaaagttatccc

SEQ ID NO: 188 - protein, 347 aa, Gossypium hirsutum
  misc_feature: Ceres CLONE ID no.1836128
  misc_feature: Bit score of 845.7 for HMM based on sequences of FIGURE 7.
  misc_feature (199)..(221): Pfam Name: DUF185 Pfam Description: Uncharacterized ACR, COG1565
  misc_feature (84)..(171): Pfam Name: adh_short Pfam Description: short chain dehydrogenase
  misc_feature: Functional Homolog Of Ceres CLONE ID no. 258034 at SEQ ID NO. 181
MALQAASSLPPTISIHKEAKSNACLKETTLFGVPFSTHFSFPLHLTQELRKKGVAAGIVRAQTAATTPAVDRAAPQGKKTLRKGNVIITGASSGLGLATAKALAETGEWHVIMACRNFLKAEKAAKSVGITKENYSVMHLDLASLESVRQFANTFRRSGRPLDALVCNAAVYLPTAKEPTYTAEGFELSVGTNHLGHFLLARLLLDDLKQSDYPYKRLIIVGSITGNTNTLAGNVPPKANLGDLRGLAGGLNGIQSSAMIDGGDFDGAKAYKDSKVCNMLTMQEFHRRYHEETGITFASLYPGCIATTGLFREHIPLFRLLFPPFQKYITKGYVSEEEAGGRLAQVN

SEQ ID NO: 189 - protein, 398 aa, Cucumis sativus
  misc_feature: Public GI ID no.10720220
  misc_feature: Bit score of 1140.3 for HMM based on sequences of FIGURE 7.
  misc_feature (87)..(174): Pfam Name: adh_short Pfam Description: short chain dehydrogenase
  misc_feature: Functional Homolog Of Ceres CLONE ID no. 258034 at SEQ ID NO. 181
MALQAASLVSPALSIPKEGKSSVCLKDSSLFGISFSDHLKSEFSSSTLRCKRELNQQIGAIRAQTTATESPAVNKATPDGKKTLRKGSVVITGASSGLGLATAKALAETGKWHVIMACRDFLKAERAAKSAGITKENYTVMHLDLASLDSVRQFVDNFRQSGRPLDVLVCNAAVYLPTAKEPTFTAEGFELSVGTNHLGHFLLSRLLLEDLNKSSYPSKRLIIVGSITGNTNTLAGNVPPKANLGDLRGLAGGLNGLKSSMIDGGEFDGAKAYKDSKVCNMLTMQEFHKRYHEETGITFASLYPGCIATTGLFREHIPLFRILFPPFQKFITQGYVSEDEAGKRLAQVVSEPSLTKSGVYWSWNKNSASFENQLSQEASDAEKARKVWELSEKLVGLA

SEQ ID NO: 190 - DNA, 1206 bp, Populus balsamifera subsp. trichocarpa
  misc_feature: Ceres ANNOT ID no.1470542
  misc_feature: Encodes the peptide sequence at SEQ ID NO 191
atggctcttcaagcagcctctatactcccttctactgtctccatctacaaagagggaaagtccaatgcttctcttaaggagacaggcttttttggagtttcagttccaaataatcacctcaaagctgaattcgactgttctctaataaaaagcaaggaattcaggaaaagggaattaccagttagaacaattagggctcaaacagctactacaactccagcaatcactgaggcagcaccagaagcaaagaaaactttaagaaagtgtgttgtggtaattaccggaacatcatcaggtttgggtttggccacggccaaagctttgtctgagacagggcaatgtcatgtgattatggcatgtaggaactttcttaaggcagagagggcagctaaaacagctggcattccaaaagagaactacactgtcatgcatcttgaccttgcgtctcttgaaagtgtccgtcaatttgtggatacgtttcgtcgttcaggtatgccgcttgatgtgctggtgtgcaatgctgcagtctacttacccactgccaaggagcccacttatactgctgaaggatttgagctcagtgttgggacaaaccatcttggtcacttcttgcttgcacggctgctgcttgatgacttgaagaaatcagattatccaaccaaacgtctcatcatcgttggctccataacaggaaacacaaacacattggctgggaatgtgcctccaaaggctaaccttggagatttgcgaggtcttgtgggtgggttgaatgacctaaacagctcacccatgatagatggaggagaatttgatggtgccaaggcctataaagacagcaaagtctgcaacatgctcacaatgcaagaattacacaggcggtaccatgaagagacgggcatcacctttgcttccctctaccctggctgcatagccgaaacaggcttattcaggaaccatattcctttgttcaggactctgttcccacccttccagaagtacattactaaaggctatgtttcagaagaggaagcaggaaaaagacttgcacaggttgtgagtgatccgagcctgacgaaatctggtgtttactggagctggaataagaactcatcttcattcgaaaaccagctctctaaagaagccagcaacgcagagaaggcattgaagttgtgggagataagtgaaaagctagttggcctggcttaa

SEQ ID NO: 191 - protein, 401 aa, Populus balsamifera subsp. trichocarpa
  misc_feature: Ceres ANNOT ID no.1470542
  misc_feature: Bit score of 1113.6 for HMM based on sequences of FIGURE 7.
  misc_feature (89)..(217): Pfam Name: adh_short Pfam Description: short chain dehydrogenase
  misc_feature: Functional Homolog Of Ceres CLONE ID no. 258034 at SEQ ID NO. 181
MALQAASILPSTVSIYKEGKSNASLKETGFFGVSVPNNHLKAEFDCSLIKSKEFRKRELPVRTIRAQTATTTPAITEAAPEAKKTLRKCVVVITGTSSGLGLATAKALSETGQCHVIMACRNFLKAERAAKTAGIPKENYTVMHLDLASLESVRQFVDTFRRSGMPLDVLVCNAAVYLPTAKEPTYTAEGFELSVGTNHLGHFLLARLLLDDLKKSDYPTKRLIIVGSITGNTNTLAGNVPPKANLGDLRGLVGGLNDLNSSPMIDGGEFDGAKAYKDSKVCNMLTMQELHRRYHEETGITFASLYPGCIAETGLFRNHIPLFRTLFPPFQKYITKGYVSEEEAGKRLAQVVSDPSLTKSGVYWSWNKNSSSFENQLSKEASNAEKALKLWEISEKLVGLA

SEQ ID NO: 192 - DNA, 1200 bp, Populus balsamifera subsp. trichocarpa
  misc_feature: Ceres ANNOT ID no.1466766
  misc_feature: Encodes the peptide sequence at SEQ ID NO 193
atggctcttcaggctgcttctttggtttcctctgcttttgttttccccaaagagggaaaatctaatgcatatttcaaggattcaagtttgttcggagtttcactttcagaacatgtcaaagctgactttagctcttgtgcattgaagtgcaagagggaattcaaccaaggagttggggctgtaagagcccaaacaatggtcgctgctactccagcactcgacagagcttcttcagaaagcaagaaaacccttgggcagggaacttgcattgtcactggtgcttcctctggattaggtctggcaacagctaaggctctagctgagactggaaaatggcacataattatggcctgcaggaacttcctgaaggcagaaagggctgcaaaatcagctggcattgcaaaagaaaactacaccattatgcatttggaccttgcttcacttgacagtgtccgccaatttgtggatacctttaggcgatcagggaggccacttgatgtgctagtttgcaatgcagctgtttacttgccaactgcgaaagagcctgcattcactgctgaaggattcgaacttagtgttggaactaaccatctgggtcatttcctcctttcaagattgttgcttgaggacatgaagatatctgattacccatcaaaacgtctcataattgttggctcaattacagggaacacaaatacattggctggcaatgtacctcctaaggccaatctcggtgacttgaggggactttcagggggcttgaatggactaaacagatcagccatgattgatggtggcgtgtttgatggtgccaaagcctacaaggacagcaaggtctgcaacatgctcaccatgcaagagttccacaggcgtttgcatgaggaaaccggcattgcatttgcttccctttaccctggttgcattgccacaacaggcttgttcagggagcacattcccttgttcaggcttctattccctccattccaaaagtacattactaagggcttcgtctccgagcacgaagctggaaaaagacttgctcaggttgtgagtgatccaagtttgacgaaatcaggggcatactggagctggaacaaacactcagcttcatttcagaaccagttgtctcaggaagctagtgatgcagagaaggctcgtaaagtatgggagattagcgagaaacttgttggcttggcctaa

SEQ ID NO: 193 - protein, 399 aa, Populus balsamifera subsp. trichocarpa
  misc_feature: Ceres ANNOT ID no.1466766
  misc_feature: Bit score of 1087.4 for HMM based on sequences of FIGURE 7.
  misc_feature (87)..(212): Pfam Name: adh_short Pfam Description: short chain dehydrogenase
  misc_feature: Functional Homolog Of Ceres CLONE ID no. 258034 at SEQ ID NO. 181
MALQAASLVSSAFVFPKEGKSNAYFKDSSLFGVSLSEHVKADFSSCALKCKREFNQGVGAVRAQTMVAATPALDRASSESKKTLGQGTCIVTGASSGLGLATAKALAETGKWHIIMACRNFLKAERAAKSAGIAKENYTIMHLDLASLDSVRQFVDTFRRSGRPLDVLVCNAAVYLPTAKEPAFTAEGFELSVGTNHLGHFLLSRLLLEDMKISDYPSKRLIIVGSITGNTNTLAGNVPPKANLGDLRGLSGGLNGLNRSAMIDGGVFDGAKAYKDSKVCNMLTMQEFHRRLHEETGIAFASLYPGCIATTGLFREHIPLFRLLFPPFQKYITKGFVSEHEAGKRLAQVVSDPSLTKSGAYWSWNKHSASFQNQLSQEASDAEKARKVWEISEKLVGLA

SEQ ID NO: 194 - protein, 405 aa, Arabidopsis thaliana
  misc_feature: Public GI ID no.15239574
  misc_feature: Bit score of 1126.0 for HMM based on sequences of FIGURE 7.
  misc_feature (93)..(221): Pfam Name: adh_short Pfam Description: short chain dehydrogenase
  misc_feature: Functional Homolog Of Ceres CLONE ID no. 258034 at SEQ ID NO. 181
MALQAASLVSSAFSVRKDGKLNASASSSFKESSLFGVSLSEQSKADFVSSSLRCKREQSLRNNKAIIRAQAIATSTPSVTKSSLDRKKTLRKGNVVVTGASSGLGLATAKALAETGKWHVIMACRDFLKAERAAQSAGMPKDSYTVMHLDLASLDSVRQFVDNFRRAEMPLDVLVCNAAVYQPTANQPTFTAEGFELSVGINHLGHFLLSRLLIDDLKNSDYPSKRLIIVGSITGNTNTLAGNVPPKANLGDLRGLAGGLNGLNSSAMIDGGDFVGAKAYKDSKVCNMLTMQEFHRRFHEDTGITFASLYPGCIATTGLFREHIPLFRTLFPPFQKYITKGYVSESEAGKRLAQVVADPSLTKSGVYWSWNKTSASFENQLSQEASDVEKARRVWEVSEKLVGLA

SEQ ID NO: 195 - protein, 405 aa, Arabidopsis thaliana
  misc_feature: Public GI ID no.968975
  misc_feature: Bit score of 1124.7 for HMM based on sequences of FIGURE 7.
  misc_feature (93)..(221): Pfam Name: adh_short Pfam Description: short chain dehydrogenase
  misc_feature: Functional Homolog Of Ceres CLONE ID no. 258034 at SEQ ID NO. 181
MALQAASLVSSAFSVRKDGKLNASASSSFKESSLFGISLSEQSKADFVSSSLRCKREQSLRNNKAIIRAQAIATSTPSVTKSSLDRKKTLRKGNVVVTGASSGLGLATAKALAETGKWHVIMACRDFLKAERAAQSAGMPKDSYTVMHLDLASLDSVRQFVDNFRRAEMPLDVLVCNAAVYQPTANQPTFTAEGFELSVGINHLGHFLLSRLLIDDLKNSDYPSKRLIIVGSITGNTNTLAGNVPPKANLGDLRGLAGGLNGLNSSAMIDGGDFVGAKAYKDSKVCNMLTMQEFHRRFHEDTGITFASLYPGCIATTGLFREHIPLFRTLFPPFQKYITKGYVSESEAGKRLAQVVADPSLTKSGVYWSWNKTSASFENQLSQEASDVEKARRVWEVSEKLVGLA

SEQ ID NO: 196 - protein, 401 aa, Arabidopsis thaliana
  misc_feature: Public GI ID no.15234129
  misc_feature: Bit score of 1089.6 for HMM based on sequences of FIGURE 7.
  misc_feature (89)..(176): Pfam Name: adh_short Pfam Description: short chain dehydrogenase
  misc_feature: Functional Homolog Of Ceres CLONE ID no. 258034 at SEQ ID NO. 181
MALQAASLVSSAFSVRKDAKLNASSSSFKDSSLFGASITDQIKSEHGSSSLRFKREQSLRNLAIRAQTAATSSPTVTKSVDGKKTLRKGNVVVTGASSGLGLATAKALAETGKWNVIMACRDFLKAERAAKSVGMPKDSYTVMHLDLASLDSVRQFVDNFRRTETPLDVLVCNAAVYFPTAKEPTYSAEGFELSVATNHLGHFLLARLLLDDLKKSDYPSKRLIIVGSITGNTNTLAGNVPPKANLGDLRGLAGGLNGLNSSAMIDGGDFDGAKAYKDSKVCNMLTMQEFHRRFHEETGVTFASLYPGCIASTGLFREHIPLFRALFPPFQKYITKGYVSETESGKRLAQVVSDPSLTKSGVYWSWNNASASFENQLSEEASDVEKARKVWEISEKLVGLA

SEQ ID NO: 197 - protein, 399 aa, Arabidopsis thaliana
  misc_feature: Public GI ID no.79316418
  misc_feature: Bit score of 1079.2 for HMM based on sequences of FIGURE 7.
  misc_feature (88)..(216): Pfam Name: adh_short Pfam Description: short chain dehydrogenase
  misc_feature: Functional Homolog Of Ceres CLONE ID no. 258034 at SEQ ID NO. 181
MALQAAYSLLPSTISIQKEGKFNASLKETTFTGSSFSNHLRAEKISTLLTIKRRQKPRFSTGIRAQTVTATPPANEASPEQKKTERKGTAVITGASSGLGLATAKALADTGKWHVIMACRNFLKAEKAARSVGMSKEDYTVMHLDLASLESVKQFVENFRRTEQPLDVLVCNAAVYQPTAKEPSFTAEGFEISVGTNHLGHFLLSRLLLDDLKKSDYPSKRMIIVGSITGNTNTLAGNVPPKANLGDLRGLASGLNGQNSSMIDGGEFDGAKAYKDSKVCNMLTMQELHRRYHEETGVTFASLYPGCIATTGLFREHIPLFRLLFPPFQKYITKGYVSEEEAGKRLAQVVSDPSLGKSGVYWSWNNNSSSFENQLSKEASDAEKAKKLWEVSEKLVGLA

SEQ ID NO: 198 - protein, 401 aa, Arabidopsis thaliana
  misc_feature: Public GI ID no.21593167
  misc_feature: Bit score of 1080.3 for HMM based on sequences of FIGURE 7.
  misc_feature (89)..(176): Pfam Name: adh_short Pfam Description: short chain dehydrogenase
  misc_feature: Functional Homolog Of Ceres CLONE ID no. 258034 at SEQ ID NO. 181
MALQAASLVSSAFSVRKDAKLNASSSSFKDSSLFGASITDQIKSEHRSSSLRFKREQSLRNLAIRAQTAATSSPTVTKSVDGKKTLRKGNVVVTGASSGLGLATAKALAQTGKWNVIMACRDFLKAERAAKSVGMPKDSYTVMHLDLASLDSVRQFVDNFRRTETPLDVLVCNAAVYFPTAKEPTYSAEGFELSVATNHLGHFLLARLLLDDLKKSDYPSKRLIIVGSITANTNTLAGNVPPKANLGDLRGLAGGLNGLNSSAMIDGGDFDGAKAYKDSKVCNMLTMQEFHRRFHEETGVTFASLYPGCIASTGLFREHIPLFRALFPPFQKYITKGYVSETESGKRLAQVVSDPSLTKSGVYWSWNNASASFENQLSEEASDVEKARKVWEISEKLVGLA

SEQ ID NO: 199 - protein, 401 aa, Arabidopsis thaliana
  misc_feature: Public GI ID no.15218860
  misc_feature: Bit score of 1077.5 for HMM based on sequences of FIGURE 7.
  misc_feature (90)..(218): Pfam Name: adh_short Pfam Description: short chain dehydrogenase
  misc_feature: Functional Homolog Of Ceres CLONE ID no. 258034 at SEQ ID NO. 181
MALQAAYSLLPSTISIQKEGKFNASLKETTFTGSSFSNHLRAEKISTLLTIKEQRRQKPRFSTGIRAQTVTATPPANEASPEQKKTERKGTAVITGASSGLGLATAKALADTGKWHVIMACRNFLKAEKAARSVGMSKEDYTVMHLDLASLESVKQFVENFRRTEQPLDVLVCNAAVYQPTAKEPSFTAEGFEISVGTNHLGHFLLSRLLLDDLKKSDYPSKRMIIVGSITGNTNTLAGNVPPKANLGDLRGLASGLNGQNSSMIDGGEFDGAKAYKDSKVCNMLTMQELHRRYHEETGVTFASLYPGCIATTGLFREHIPLFRLLFPPFQKYITKGYVSEEEAGKRLAQVVSDPSLGKSGVYWSWNNNSSSFENQLSKEASDAEKAKKLWEVSEKLVGLA

SEQ ID NO: 200 - protein, 399 aa, Pisum sativum
  misc_feature: Public GI ID no.266742
  misc_feature: Bit score of 1135.6 for HMM based on sequences of FIGURE 7.
  misc_feature (87)..(215): Pfam Name: adh_short Pfam Description: short chain dehydrogenase
  misc_feature: Functional Homolog Of Ceres CLONE ID no. 258034 at SEQ ID NO. 181
MALQTASMLPASFSIPKEGKIGASLKDSTLFGVSSLSDSLKGDFTSSALRCKELRQKVGAVRAETAAPATPAVNKSSSEGKKTLRKGNVVITGASSGLGLATAKALAESGKWHVIMACRDYLKAARAAKSAGLAKENYTIMHLDLASLDSVRQFVDNFRRSEMPLDVLINNAAVYFPTAKEPSFTADGFEISVGTNHLGHFLLSRLLLEDLKKSDYPSKRLIIVGSITGNTNTLAGNVPPKANLGDLRGLAGGLTGLNSSAMIDGGDFDGAKAYKDSKVCNMLTMQEFHRRYHEETGITFASLYPGCIATTGLFREHIPLFRTLFPPFQKYITKGYVSEEESGKRLAQVVSDPSLTKSGVYWSWNNASASFENQLSQEASDAEKARKVWEVSEKLVGLA

SEQ ID NO: 201 - protein, 398 aa, Daucus carota
  misc_feature: Public GI ID no.10720233
  misc_feature: Bit score of 1134.4 for HMM based on sequences of FIGURE 7.
  misc_feature (86)..(173): Pfam Name: adh_short Pfam Description: short chain dehydrogenase
  misc_feature: Functional Homolog Of Ceres CLONE ID no. 258034 at SEQ ID NO. 181
MALQAASFLPSSFSINKEGKANVSLKETSLFGVTFSDSLRTDFSSLRTRRGCRQISQTGAIRSQAVATTPSVNRATGEGKKTLRKGSVIITGASSGLGLATAKALAETGKWHVIMACRDFLKAERAAKSAGMPKENYTIMHLDLASLDSVRQFVETFRRSERPLDVLVCNAAVYFPTAKEPTYTADGFELSVGTNHLGHFLLSRLLLDDLNKSDYPSKRLIIVGSITGNTNTLAGNVPPKANLGDLRGLAGGLNGMNSSAMIDGAEFDGAKAYKDSKVCNMLTMQEFHRRYHEETGITFASLYPGCIATTGLFREHIPLFRTLFPPFQKYITKGYVSEAESGKRLAQVVSEPSLTKSGVYWSWNKDSASFENQLSEEASDVEKARKVWEVSEKLVGLA

SEQ ID NO: 202 - protein, 397 aa, Nicotiana tabacum
  misc_feature: Public GI ID no.21068893
  misc_feature: Bit score of 1128.6 for HMM based on sequences of FIGURE 7.
  misc_feature (85)..(207): Pfam Name: adh_short Pfam Description: short chain dehydrogenase
  misc_feature: Functional Homolog Of Ceres CLONE ID no. 258034 at SEQ ID NO. 181
MALQAAALVPSAFSISKEGKASANLKNSSLFGVSLSDYSKSDFGSSSFKVKSQRRLSNGAVRATMVASPDVTTNSPAGKKTLRKGCVIVTGASSGLGLATAKALSETGKWHVIMACRDFLKAEKAAKSVGMPKENYTIMHLDLASLDSVRQFVDNFRRSGRPLDVLVANAAVYQPTAKEPSFTAEGFEISVGTNHLGHFLLSRLLLDDLKQSDYPSKRLIIVGSITGNTNTLAGNVPPKANLGDLRGMAGGLNGINSSAMIDGGEFDGAKAYKDSKVCNMLTMQEFHRRYHEETGITFASLYPGCIATTGLFREHIPLFRLLFPPFQKYITKGFVSETEAGKRLAQVVSDPSLTKSGVYWSWNKDSASFENQLSEEASDVEKARKVWEVSEKLVGLA

SEQ ID NO: 203 - protein, 399 aa, Nicotiana tabacum
  misc_feature: Public GI ID no.21068895
  misc_feature: Bit score of 1083.1 for HMM based on sequences of FIGURE 7.
  misc_feature (87)..(174): Pfam Name: adh_short Pfam Description: short chain dehydrogenase
  misc_feature: Functional Homolog Of Ceres CLONE ID no. 258034 at SEQ ID NO. 181
MALQAASLLPSAFSIHKEGKSCATLKDSSLFGVALSYNQKSKFIPPAAWNKELTKKIAAVPIRAQIAATTPAVNQSTSEQKKTLRKGNVIITGASSGLGLATAKAIGETGEWHVIMACRDFLKAEKAAKSVGIPKENYTVMHLDLASLESVRQFVDTFRRSGRPLDALVCNAAVYLPTAKEPTFTADGFELSVGTNHLGHFLLSRLLLDDLKQSDYPQKRLIIVGSITGNTNTLAGNVPPKANLGDLRGLSGGLNSLNCSPMIDGGEFDGAKAYKDSKVCNMLTMQEFHRRFHEETGIAFASLYPGCIAETGLFRNHIPLFRALFPPFQKYITKGYVSEAEAGKRLAQVVRDPSLSKSGVYWSWNNTSSSFENQLSKEASDAEKARKLWEVSEKLVGLA

SEQ ID NO: 204 - protein, 395 aa, Hordeum vulgare
  misc_feature: Public GI ID no.10720236
  misc_feature: Bit score of 1104.2 for HMM based on sequences of FIGURE 7.
  misc_feature (83)..(211): Pfam Name: adh_short Pfam Description: short chain dehydrogenase
  misc_feature: Functional Homolog Of Ceres CLONE ID no. 258034 at SEQ ID NO. 181
MALQAATSFLPSALSARKEGAAKDSAFFGVRLADGLKLDATSLGLRTKRVNTSSVAIRAQAAAVSAPTATPASPAGKKTVRTGNAIITGASSGLGLATAKALAESGKWHVIMACRDYLKTARAARAAGMPKGSYTIVHLDLASLDSVRQFVKNVRQLDMPIDVVVCNAAVYQPTAKEPSFTADGFEMSVGVNHLGHFLLARELLEDLKASDYPSKRLIIVGSITGNTNTLAGNVPPKANLGDLRGLAAGLNGVGSAAMIDGAEFDGAKAYKDSKVCNMLTMQEFHRRYHEETGVTFASLYPGCIATTGLFREHIPLFRLLFPPFQKYITKGYVSEEEAGKRLAQVVSEPSLTKSGVYWSWNKNSASFENQLSEEASDTEKARKVWELSEKLVGLA

SEQ ID NO: 205 - protein, 387 aa, Oryza sativa
  misc_feature: Public GI ID no.90398977
  misc_feature: Bit score of 1057.6 for HMM based on sequences of FIGURE 7.
  misc_feature (74)..(202): Pfam Name: adh_short Pfam Description: short chain dehydrogenase
  misc_feature: Functional Homolog Of Ceres CLONE ID no. 258034 at SEQ ID NO. 181
MALQVQAALLPSALSVPKKGNLSAVVKEPGFLSVSQKAKKPSLVVRAVATPAAPVASPGAGTSKADGKKTLRQGVVVITGASSGLGLAAAKALAETGKWHVVMACRDFLKAATAAKAAGMAAGSYTVMHLDLASLDSVRQFVDNFRRSGMPLDALVCNAAIYRPTARQPTFTADGYEMSVGVNHLGHFLLARLMLDDLKKSDYPSRRLIILGSITGNTNTLAGNVPPKAGLGDLRGLAGGLRGQNGSAMIDGAESFDGAKAYKDSKICNMLTMQEFHRRFHEETGITFASLYPGCIATTGLFREHIPLFRLLFPPFQRFVTKGFVSEAESGKRLAQVVGDPSLTKSGVYWSWNKDSASFENQLSQEASDPEKARKLWDLSEKLVGLA

SEQ ID NO: 206 - DNA, 1185 bp, Sorghum bicolor
  misc_feature: Ceres ANNOT ID no.6014695
  misc_feature: Encodes the peptide sequence at SEQ ID NO 207
atggcgctccaggcggcgacgtccttcctcccctccgccctctccgcgcgcaaggaggggtcggtcaaggactcggcgttcttgggtgttcgtctcgcggatggcctcaagctggagaccactgctctcggcctacgcaccaagagggtgagcacgtcggtggccatccgcgcgcagacggcagcggtgtcctccccatcagtgacccccgcgtcgccgtcaggcaagaagaccctccgcaagggcacggcggtcatcaccggcgcgtcgtccggtctcggcctggccacggcgaaggccctggcggagacaggcaagtggcacgtcatcatggcctgccgcgacttcctcaaggcgtcgcgcgcggccaaggcggccggcatggacaaggacagcttcaccatcgtgcacctggacctcgcctctctcgacagcgtccgccagttcgtcaagaacgtgcgccagctggagatgcccatcgacgtcgtggtctgcaacgccgccgtgtaccagcccaccgccaaggacccgtcctacaccgccgacggcttcgagatgagcgtcggcgtcaaccacctcggccacttcctcctcgcccgcgagctcctcagcgacctccagtcctccgactacccctccaagcgcctcatcatcgtcggctccatcaccgggaacacgaacacgctggcggggaacgtgccgccgaaggcgaacctgggtgacctgcgcggcctcgccggcggcctcaacggcattggcagctcggtgatgatcgacggcggggagttcgacggcgccaaggcgtacaaggacagcaaggtgtgcaacatgctgacgatgcaggagttccaccgccggtaccacgaggagacgggcgtcaccttcgcgtcgctctacccgggctgcatcgccaccacgggcctgttccgcgagcacatcccgctgttccggctgctcttcccgccgttccagaagtacatcaccaaggggtacgtctccgaggaggaggccgggaagcggctggcgcaggtggtgagcgaccccagcctgaccaagtccggcgtgtactggagctggaacaagaactcggcgtccttcgagaaccagctctccgaggaggccagcgactccgacaaggccaagaagctgtgggagatcagcgagaagctcgtcggcttggcgtga

SEQ ID NO: 207 - protein, 394 aa, Sorghum bicolor
  misc_feature: Ceres ANNOT ID no.6014695
  misc_feature: Bit score of 1119.6 for HMM based on sequences of FIGURE 7.
  misc_feature (82)..(169): Pfam Name: adh_short Pfam Description: short chain dehydrogenase
  misc_feature: Functional Homolog Of Ceres CLONE ID no. 258034 at SEQ ID NO. 181
MALQAATSFLPSALSARKEGSVKDSAFLGVRLADGLKLETTALGLRTKRVSTSVAIRAQTAAVSSPSVTPASPSGKKTLRKGTAVITGASSGLGLATAKALAETGKWHVIMACRDFLKASRAAKAAGMDKDSFTIVHLDLASLDSVRQFVKNVRQLEMPIDVVVCNAAVYQPTAKDPSYTADGFEMSVGVNHLGHFLLARELLSDLQSSDYPSKRLIIVGSITGNTNTLAGNVPPKANLGDLRGLAGGLNGIGSSVMIDGGEFDGAKAYKDSKVCNMLTMQEFHRRYHEETGVTFASLYPGCIATTGLFREHIPLFRLLFPPFQKYITKGYVSEEEAGKRLAQVVSDPSLTKSGVYWSWNKNSASFENQLSEEASDSDKAKKLWEISEKLVGLA

SEQ ID NO: 208 - protein, 388 aa, Triticum aestivum
  misc_feature: Public GI ID no.10720235
  misc_feature: Bit score of 1034.5 for HMM based on sequences of FIGURE 7.
  misc_feature (75)..(203): Pfam Name: adh_short Pfam Description: short chain dehydrogenase
  misc_feature: Functional Homolog Of Ceres CLONE ID no. 258034 at SEQ ID NO. 181
MALQLLPSTLSVPKKGSSMGAAAVKDTAAFLGVSSKAKKASLAVRTQVATAPSSVTTSPGSATAKPSGKKTLRQGVVVITGASSGLGLAAAKALAETGKWHVVMACRDFLKASKAAKAAGMADGSYTVMHLDLASLDSVRQFVDAFRRAEMPLDVLVCNAAIYRPTARTPTFTADGHEMSVGVNHLGHFLLARLLMEDLQKSDYPSRRMVIVGSITGNSNTLAGNVPPKASLGDLRGLAGGLSGASGSAMIDGDESFDGAKAYKDSKVCNMLTMQEFHRRYHEETGITFSSLYPGCIATTGLFREHIPLFRTLFPPFQKFVTKGFVSEAESGKRLAQVVAEPSLTKSGVYWSWNKDSASFENQLSQEASDPEKARKVWELSEKLVGLA

SEQ ID NO: 209 - protein, 395 aa, Musa acuminata
  misc_feature: Public GI ID no.58003345
  misc_feature: Bit score of 1093.3 for HMM based on sequences of FIGURE 7.
  misc_feature (83)..(170): Pfam Name: adh_short Pfam Description: short chain dehydrogenase
  misc_feature: Functional Homolog Of Ceres CLONE ID no. 258034 at SEQ ID NO. 181
MALQASFLPSALSARKEGKVACTVKESAFLGSSILEHHKSHPVLRTKRESNHSVGVVKAQTTAVAAPGLNQSAVHGKKVLRKGVVVITGASSGLGLAAAKALAETEKWHVVMACRDFLKAEKAAQSAGMAKENYSIMHLDLASLDSVRQFVHAFRQSGRPLDVLVCNAAIYRPTARTPTYTADGYEMSVGVNHLGHFLLANMLLEDLKKSDYPSRRLIILGSITGNTNTLAGNVPPKAGLGDLRGLAGGLDGRNSSAMIDGGAFDGAKAYKDSKICNMLTMQELHRRFHEDTGITFASLYPGCIATTGLFREHIPLFRLLFPPFQKFITKGFVSEDESGQRLAQVVGDPSLLKSGVYWSWNNNSASFENQLSEEASDAVKAQKLWEISEKLVGLA

SEQ ID NO: 210 - protein, 400 aa, Pinus mugo
  misc_feature: Public GI ID no.7330644
  misc_feature: Bit score of 1099.7 for HMM based on sequences of FIGURE 7.
  misc_feature (88)..(118): Pfam Name: adh_short Pfam Description: short chain dehydrogenase
  misc_feature: Functional Homolog Of Ceres CLONE ID no. 258034 at SEQ ID NO. 181
MGTLLQTHIGSVAFALQKEGGHSASAKDSAFLGVSLVEHGKKEFSFPVIRAKKVTSRNTNVPRIRAQTVAAPVETKDAPASKKTDRKGNVIITGASSGLGLATAKALGESGKWHIIMACRDFLKAERMARSVGIPKENYSVMHLDLASLESVRQFADNFRRSGRPLDVLVCNAAIYLPTAKLPTYTAEGFELSVGTNHLGHFLLSRLLLEDLKTSDFNSKRVIIVGSITGNTNTLAGNVPPKANLGDLRGLAGGLNGVNISPMIDGGEFDGAKAYKDSKVCNMLTMQEFHRRYHEETGITFASLYPGCIATTGLFREHIPLFRLLFPPFQKYITKGFVSEEEAGKRLAQVVSNPSLTKSGVYWSWNNNSGSFENQLSEEASDPEKAKKLWEISEKLVGLA

SEQ ID NO: 211 - DNA, 1658 bp, Panicum virgatum
  misc_feature: Ceres CLONE ID no.1787867
  misc_feature: Encodes the peptide sequence at SEQ ID NO 212
atccccgccgccgcgcctcccatcctctcctctcctctccgccccgcgccgaagaacccccggccaaacccccagcccgtgataacctcgcacctgccttcgccccgtcgaccatggcgctccaggcggcgacgtccttcctcccctcagccctctccgcgcgcaaggaggtgagccgcgggagctctttctccgtgcgtgcgcgtgcgtttcccccggcgagcaccccggctgcggctgcgattgcggggtcggtgaaggactcggcgttcctgggtgttcgtctcgcggatggtctcaagctggagaccagcgctctgggccagcgcaccaagagggcgagcacgtcggtggccatccgcgcgcagacggcggcggtgtcctccccgtcggtgacgcccgcgtcgccgtcgggcaagaagaccctccgcaagggcaccgcggtcatcaccggcgcgtcgtcgggcctcggcctggccacggcgaaggccctggcggagaccggcaagtggcacgtcatcatggcgtgccgcgacttcctcaaggcgtcgcgcgcggccaaggcggcgggcatggacaaggacagctacaccatcgtgcacctggacctggcgtccctggacagcgtccgccagttcgtgaagaacgtgcggcagctggagatgcccatcgacgtggtggtctgcaacgccgccgtgtaccagcccaccgccaaggagccctcctacaccgccgacggcttcgagatgagcgtcggcgtcaaccatctcggccacttcctcctcgcctgcgagctcctcagcgacctccagtcctccgactacccctccaagcgcctcatcatcgtcggctccatcaccgggaacacgaacacgctggccgggaacgtgccgccgaaggcgaacctgggcgacctgcgcgggctcgccggcggcctgaacggcgtgggcagctcggtgatgatcgacggcggggagttcgacggcgccaaggcgtacaaggacagcaaggtgtgcaacatgctgacgatgcaggagttccaccggcggtaccacgaggagacgggcgtgaccttcgcgtcgctctacccggggtgcatcgccaccacggggctgttccgggagcacatcccgctgttccggctgctgttcccgccgttccagaagtacatcaccaaggggtacgtctccgaggaggaggccgggaagcggctggcgcaggtggtgagcgaccccagcctcaccaagtccggcgtctactggagctggaacaagaactcggcgtccttcgagaaccagctctccgaggaggccagcgacgccgacaaggccaagaagctctgggagatcagcgagaagctcgtcggcttggcatgatcgatgtacatcaccatggccggcgccggctgccggtgacagtttttttaattcccctctaggacaagttcgttagttgatctcagacagagtgttaatgcccccgcgtcaagagtgccaagaacacaagtgtgtacacgtgtacaatatatgctactgcaccgtgatggtttttgcagtggactgtaactctagccttttgctctgcttttggtcattgattacgggtaataagaagtcactattgggctaccaaaatcaaatcagcaattgcctttcagc

SEQ ID NO: 212 - protein, 420 aa, Panicum virgatum
  misc_feature: Ceres CLONE ID no.1787867
  misc_feature: Bit score of 1109.2 for HMM based on sequences of FIGURE 7.
  misc_feature (108)..(195): Pfam Name: adh_short Pfam Description: short chain dehydrogenase
  misc_feature: Functional Homolog Of Ceres CLONE ID no. 258034 at SEQ ID NO. 181
MALQAATSFLPSALSARKEVSRGSSFSVRARAFPPASTPAAAAIAGSVKDSAFLGVRLADGLKLETSALGQRTKRASTSVAIRAQTAAVSSPSVTPASPSGKKTLRKGTAVITGASSGLGLATAKALAETGKWHVIMACRDFLKASRAAKAAGMDKDSYTIVHLDLASLDSVRQFVKNVRQLEMPIDVVVCNAAVYQPTAKEPSYTADGFEMSVGVNHLGHFLLACELLSDLQSSDYPSKRLIIVGSITGNTNTLAGNVPPKANLGDLRGLAGGLNGVGSSVMIDGGEFDGAKAYKDSKVCNMLTMQEFHRRYHEETGVTFASLYPGCIATTGLFREHIPLFRLLFPPFQKYITKGYVSEEEAGKRLAQVVSDPSLTKSGVYWSWNKNSASFENQLSEEASDADKAKKLWEISEKLVGLA

SEQ ID NO: 213 - protein, 402 aa, Oryza sativa subsp. japonica
  misc_feature: Public GI ID no.18071421
  misc_feature: Bit score of 1091.2 for HMM based on sequences of FIGURE 7.
  misc_feature (86)..(173): Pfam Name: adh_short Pfam Description: short chain dehydrogenase
  misc_feature: Functional Homolog Of Ceres CLONE ID no. 258034 at SEQ ID NO. 181
MALQAATTTSFLPSALSARKEGAVKDSAFLGVRLGDGLKLETSALGLRTKRVSTSSVAIRAQASAAVSSPTVTPASPSGKQTLRKGTAVITGASSGLGLATAKALAETGRWHVVMGCRDFLKASRAAKAAGMEKGSYTIVHLDLASLDSVRQFVANVRRLEMPVDVVVCNAAVYQPTAKQPSFTADGFEMSVGVNHLGHFLLARELLADLTSSDYPSKRLIIVGSITGNTNTLAGNVPPKANLGDLRGLASGLDGVSSSAMIDGGEFDGAKAYKDSKVCNMLTMQEFHRRYHGETGVTFASLYPGCIATTGLFREHVPLFRLLFPPFQKYITKGYVSEEEAGKRLAQVVSDPSLTKSGVYWSWNNNSASFENQLSEEASDPEKAKKVWELSEKLVGLADHDQ

SEQ ID NO: 214 - protein, 458 aa, Marchantia paleacea
  misc_feature: Public GI ID no.10720231
  misc_feature: Bit score of 925.1 for HMM based on sequences of FIGURE 7.
  misc_feature (146)..(233): Pfam Name: adh_short Pfam Description: short chain dehydrogenase
  misc_feature: Functional Homolog Of Ceres CLONE ID no. 258034 at SEQ ID NO. 181
MPKRSNGSLVVRCAVSVVRFSKENVSCDLASENFTFSRDSFPVVSTVLRVSEAVYRMAAVASLGSALSVSSAALSQNVSVSNNATKESAFLGLRMGEVAKFGGALLSVSTVAANLKSKPGVLSVNAVTAPAETMNKPSSKKTATKSTCIITGASSGLGLATAKALADTGEWHVIMACRDFLKAERAARSVGIPKDSYTVIHCDLASFDSVRAFVDNFRRTERQLDVLVCNAAVYFPTDKEPKFSAEGFELSVGTNHMGHFLLARLLMEDLQKAKDSLKRMIIVGSITGNSNTVAGNVPPKANLGHLRGLAGGLNGVNSSSMIDGGEFDGAKAYKDSKVCNMFTMQEFHRRYHAETGITFSSLYPGCIAETGLFRNHVTLFRTLFPPFQKYITKGYVSEEEAGKRMAQVVSDPKLSKSGVYWSWNKDSGSFENELSEEASNPEKAKRLWELSERLSGLV

SEQ ID NO: 215 - protein, 412 aa, Ostreococcus tauri
  misc_feature: Public GI ID no.116058730
  misc_feature: Bit score of 797.7 for HMM based on sequences of FIGURE 7.
  misc_feature (56)..(87): Pfam Name: adh_short Pfam Description: short chain dehydrogenase
  misc_feature: Functional Homolog Of Ceres CLONE ID no. 258034 at SEQ ID NO. 181
MRAVAAHYRAPTRTRRAPAIRQPSTSRARRTSTLAVARAAGSSSQNIMPSNGANKPVAIITGASSGLGLYTAKALIEKGYFVVMAVRDPRKGETKANELGFDKKSYAVMYCELGELASVREFCSGFRRSPYVKNFQALVCNAALYLPNATVPSYTKDGFEECVGVNHLAHHLMCLELLDDLAKAPDANMKRLIIVGSVTGNTNTLAGQVPPRAGLGDLSGLRNGFKNSDRNQGAHIDGSRFIGAKAYKDSKLCNMLDIKVFAERYGESTGIKFSTMYPGCIADSNLFRNHTPFFRWLFPILQKNVTKGYVSEEEAGQRLASIVYDPRYTEQGAYWAWKGGGDQLWDNFNNNNEDTRTIAFNNKPSREGRDMAKANAMFDISTELVGYKPNVIDGVSKAFDRVISSATEKISK

SEQ ID NO: 216 - protein, 402 aa, Physcomitrella patens subsp. patens
  misc_feature: Public GI ID no.34915978
  misc_feature: Bit score of 1037.5 for HMM based on sequences of FIGURE 7.
  misc_feature (89)..(176): Pfam Name: adh_short Pfam Description: short chain dehydrogenase
  misc_feature: Functional Homolog Of Ceres CLONE ID no. 258034 at SEQ ID NO. 181
MSTCAVAALSSPPTSFTSERVTSGITASVQPSAFLGTKISVCKGASVLSRAVSASISRQPLVAPIRAQGVAAPADTKAPTTTKKTDTKSTVIITGASSGLGLATAKVLADSGEWHVIMACRDFLKAERAARAVGMPKDSYTVIHCDLSSLNSVKQFVDNVRQSGRPLDVLVCNAAVYLPTAKEPRYTADGFELSVGTNHLGHFLLANMLMEDIQHKENDTNRRVIIVGSITGNTNTIAGNVPPKANLGDLRGLAGGLDGVRSSVMIVGGEFDGAKAYKDSKVCNMLTMQEMHRRFHEKTGVTFASLYPGCIATTGLFREHYQLFRTLFPPFQKYITKGYVSEEEAGKRLAQVVSDPTLNKSGVYWSWNNQSNSFENELSQEASDAEKAKKLWEISEKLVNLS

SEQ ID NO: 217 - protein, 402 aa, Physcomitrella patens subsp. patens
  misc_feature: Public GI ID no.34915980
  misc_feature: Bit score of 1026.8 for HMM based on sequences of FIGURE 7.
  misc_feature (89)..(176): Pfam Name: adh_short Pfam Description: short chain dehydrogenase
  misc_feature: Functional Homolog Of Ceres CLONE ID no. 258034 at SEQ ID NO. 181
MATCVAAAVSSSLTALTSERATTGITASVQSSAFVGIKVSVCKDASALLKAVNAGTSRQPLVEPVRAQSVAAPASTNASTSSKKTDTKSTVIITGASSGLGLATAKVLADSGEWHVIMACRDFLKAERAAKSVGMPKENYTVMHCDLSSLNSVKQFVDNFRRSGRPLDVLVCNAAVYLPTAKEPRYTADGFELSVGTNHLGHFLLANLLMEDIQHKENNNSRRVIIVGSITGNTNTVAGNVPPKANLGDLRGLAGGLDGVRSSVMIDGGEFDGAKAYKDSKVCNMLTMQEMHRRFHEKTGVTFASLYPGCIATTGLFREHYSLFRTLFPPFQKYITKGYVSEEESGRRLAQVVSDPSMNKSGVYWSWNNQSGSFENELSQEASDAEKAKKLWEVSEKLVGLA

SEQ ID NO: 218 - protein, 398 aa, Vigna radiata
  misc_feature: Public GI ID no.9587209
  misc_feature: Bit score of 1123.9 for HMM based on sequences of FIGURE 7.
  misc_feature (86)..(173): Pfam Name: adh_short Pfam Description: short chain dehydrogenase
  misc_feature: Functional Homolog Of Ceres CLONE ID no. 258034 at SEQ ID NO. 181
MAVQAASLVSGYFSVAKEGKPGMSLRNTTMFGLSLEDALKADFSSLSFSCKREFQKKVCPLRVQSVATTPGVTKASPEGKKTLRKGSVIITGASSGLGLATAKALAETGKWHVIMACRDFLKAERAAKSSGISKENYTVMHLDLASLDSVRQFVDNFRQSGRPLDVLVCNAAVYLPTASEPTHTADGFELSVGTNHLGHFLLSRLLLEDLNKSDYPSKRLIIVGSITGNTNTLAGNVPPKANLGDLRGLAGGLNGLNTSAMIDGGSFDGAKAYKDSKVCNMLTMQEFHRRYHEETGITFASLYPGCIATTGLFREHIPLFRLLFPPFQKFITKGFVSEDESGKRLAQVVSDPSLTKSGVYWSWNKASASFENQLSQEASDADKARKVWEISEKLVGLA

SEQ ID NO: 219 - protein, 369 aa, Vigna radiata
  misc_feature: Public GI ID no.13699822
  misc_feature: Bit score of 921.0 for HMM based on sequences of FIGURE 7.
  misc_feature (86)..(173): Pfam Name: adh_short Pfam Description: short chain dehydrogenase
  misc_feature: Functional Homolog Of Ceres CLONE ID no. 258034 at SEQ ID NO. 181
MAVQAASLVSGYFSVAKEGKPGMSLRNTTMFGLSLEDALKADFSSLSFSCKREFQKKVCPLRVQSVATTPGVTKASPEGKKTLRKGSVIITGASSGLGLATAKALAETGKWHVIMACRDFLKAERAAKSSGISKENYTVMHLDLASLDSVRQFVDNFRQSGRPLDVLVCNAAVYLPTASEPTHTADGFELSVGTNHLGHFLLSRLLLEDLNKSDYPSKRLIIVGSITGNTNTLAGNVPPKANLGDLRGLAGGLNGLNTSAMIDGGSFDGAKAYKDSKVCNMLTMQEFHRRYHEETGITFASLYPGCIATTGLFREHIPLFRLLFPPFQKFITKGFVSEDESGKRLAQVVEITNKRLWRWLYTKKVGMSV

SEQ ID NO: 220 - protein, 269 aa, Physcomitrella patens
  misc_feature: Public GI ID no.71608998
  misc_feature: Bit score of 503.8 for HMM based on sequences of FIGURE 5.
  misc_feature (40)..(267): Pfam Name: Carb_anhydrase Pfam Description: Eukaryotic-type carbonic anhydrase
  misc_feature: Functional Homolog Of Ceres CLONE ID no. 97982 at SEQ ID NO. 114
MASQLVQAVAAVVVLQCISASWVGAWAGSAQAEGGDEVHWDYSGGSHGPGGWGDLKAEWGVCKSGSRQSPIAITALDLVTDRSLGKLDAKYRKRVHATLYNSGHGAEVSMPAGSGRLRIGGETYRPVQFHIHMPSEHTIMNQSFPLELHLVHKSDDGKLAVIGFLFEEGGESEFLAQFAHEVPSSNSPGVKVDLGHIKMMKPERNYGTYMGSLTTPPCAEGVTWILSLFNFQTASAEQLAKLRASVPKGHNNRPTFGSAGRGFRMRTNA

SEQ ID NO: 221 - DNA, 1069 bp, Gossypium hirsutum
  misc_feature: Ceres CLONE ID no.1938642
  misc_feature: Encodes the peptide sequence at SEQ ID NO 222
tagaaaatttctccactctgttttcccccaacaaaaaagaaaagaaaaccgttgattttttggcattgaaagatcaaaacatgaagaaccaaaccaaaccagcttttattcatgttttacttatcttttcggccctgtttcactcctattccacctcagtttcagctcaagaagttgaggatgaacaagaatttagttactcggaggaaagtgggaaaggacccaatcaatggggaaatatcaagaaagaatggtctgattgcaaaactggaaaaaatcaatcaccaattgatattccgagtcgtaagacgaaggtaataaagaatcctgggaggctagatatgttatataagcccacagaatttattgttaagaaccgaggccacgatattttgttgaaaattcattggctgaagagtgcgggttcaatcaaaatcaatggcacagaatactttcttcaacaggcacattggcactctccttctgaacatgccattgatggcagaagatacgctttggaggtacatttggtgcaccaagccaaggaccctaaagtgaagcacaatctagctgttgttgggctactttacaagtatggaaaacccgatgctttcctctccaagctcttaggcaagattagtgccacgaatgatgaaatccatgaaaagccattggggtttgttgatccaacccatattgatacaaggatgggtggcaaggcgtattacagatacattggttctttgaccgtccctccttgcactgaaggtgtcatttggtcagtccagaagcaggtaaaacaagtttcaaaggagcaagttcatgcaatccgtgtacttgtgcatgataaagcagaagaaaatgcaagaccagtgcagccactaaatcaaagagaagtagaactttacagtcccatatgaaatctagaagcttatactgaatttttcccttaaattcttttatttttttaatcatttatgttataaaaatgtccatacattttgtatgtcatatattatttatagtttttttttgatattatagaaaatgatacagttaagtgcgtttt

SEQ ID NO: 222 - protein, 279 aa, Gossypium hirsutum
  misc_feature: Ceres CLONE ID no.1938642
  misc_feature: Bit score of 596.7 for HMM based on sequences of FIGURE 5.
  misc_feature (215)..(274): Pfam Name: Carb_anhydrase Pfam Description: Eukaryotic-type carbonic anhydrase
  misc_feature: Functional Homolog Of Ceres CLONE ID no. 97982 at SEQ ID NO. 114
MKNQTKPAFIHVLLIFSALFHSYSTSVSAQEVEDEQEFSYSEESGKGPNQWGNIKKEWSDCKTGKNQSPIDIPSRKTKVIKNPGRLDMLYKPTEFIVKNRGHDILLKIHWLKSAGSIKINGTEYFLQQAHWHSPSEHAIDGRRYALEVHLVHQAKDPKVKHNLAVVGLLYKYGKPDAFLSKLLGKISATNDEIHEKPLGFVDPTHIDTRMGGKAYYRYIGSLTVPPCTEGVIWSVQKQVKQVSKEQVHAIRVLVHDKAEENARPVQPLNQREVELYSPI

SEQ ID NO: 223 - DNA, 825 bp, Populus balsamifera subsp. trichocarpa
  misc_feature: Ceres ANNOT ID no.1488622
  misc_feature: Encodes the peptide sequence at SEQ ID NO 224
atgggaaagctagcaatccagctcctctttttgatcactttcttcctcgttcttgtttcgcatatcctcccgataacatctcaagaacttgaggatgaaacggagtttgattacaatccatatagtgagaggggaccggctcactggggaaggattcaccctgaatgggttgcatgtagcaatggatctatgcagtctcctattgatctgttgaacgaaagagttgatatagtctcctatttggggagactcaatagaagttacaagcctggcaatgccactcttaggaataggggacatgatattatgctgaaatgggaaagtggtgcaggaactattgaaataaatggaactgaatatgtactcaaacagtgtcactggcattcaccttctgaacatacaatcgatggcaagaggtttgctttagaggcgcacatggttcatgagagcctcgatggaaaggttgctgttgttgggattctgtacaagataggaagaccagactctttcctgtcatctttgacagaacaattagaatccgttgccggcacaaatgaacgagataccgtggttggcgtagtcgatccaaggaacattgagataggcagcagaaagtactatagatacttgggctccctcacgactcctccttgcactgaaaatgttctgtggaccattgtgaaaaaggtgaggactgccacaagagaacaagtcaggttgcttcgtgtagctgttcatgatgactcggacacaaatgcaagacctctacaaccactaaatggtcgatcggtgaaactttttgtaccagaagacaaacatgactga

SEQ ID NO: 224 - protein, 274 aa, Populus balsamifera subsp. trichocarpa
  misc_feature: Ceres ANNOT ID no.1488622
  misc_feature: Bit score of 652.4 for HMM based on sequences of FIGURE 5.
  misc_feature (42)..(267): Pfam Name: Carb_anhydrase Pfam Description: Eukaryotic-type carbonic anhydrase
  misc_feature: Functional Homolog Of Ceres CLONE ID no. 97982 at SEQ ID NO. 114
MGKLAIQLLFLITFFLVLVSHILPITSQELEDETEFDYNPYSERGPAHWGRIHPEWVACSNGSMQSPIDLLNERVDIVSYLGRLNRSYKPGNATLRNRGHDIMLKWESGAGTIEINGTEYVLKQCHWHSPSEHTIDGKRFALEAHMVHESLDGKVAVVGILYKIGRPDSFLSSLTEQLESVAGTNERDTVVGVVDPRNIEIGSRKYYRYLGSLTTPPCTENVLWTIVKKVRTATREQVRLLRVAVHDDSDTNARPLQPLNGRSVKLFVPEDKHD

SEQ ID NO: 225 - DNA, 825 bp, Populus balsamifera subsp. trichocarpa
  misc_feature: Ceres ANNOT ID no.1462112
  misc_feature: Encodes the peptide sequence at SEQ ID NO 226
atgggaaagctagcaatccagctcctctttttgatcactttcttcctcgttcttgtttcgcgtatcctcccggcaacatctcaagaagttgaggacgaggcagactttaattatgatccaaatggggagaagggacctgctaactggggaaggattcaccctgagtggggtgcttgtagcaatggatctatgcagtctcctatcgatctgttgagcgaaagagtcgatgtggtgtcccatttggggagactcagtagaagttacaagcctgctaatgccactcttaggaatcggggccatgatatgatgctgaaatgggaaggtgctgcaggaagcattgaaataaatggaactgaatatctactcaaacagtgccactggcattcaccttcggaacatacaatcaatggcaagaggcttgctttagaggtgcacatggttcatgagagccttgatggaaaggttgctgttgttgggattatgtacatgataggaaggccagactctttcctgtcatctttgacaaaacaattacaatcggttgctggcacctatgaacgagatacagtggcgggagtagttgatccaaggaacatcaagataggcagcagaaagtattacagatacattggctcccttacaattccaccttgcactgaaaatgttctgtggaccattgttagaaaggtgaggactgccacaagagaacaagttagaatgcttcgtgtagctgttcatgatgaatcagacaccaatgcaagacaaatacaaccaataaatagtcgaacggtgaaactttttagaccagaagacaaggatgactaa

SEQ ID NO: 226 - protein, 274 aa, Populus balsamifera subsp. trichocarpa
  misc_feature: Ceres ANNOT ID no.1462112
  misc_feature: Bit score of 590.8 for HMM based on sequences of FIGURE 5.
  misc_feature (41)..(267): Pfam Name: Carb_anhydrase Pfam Description: Eukaryotic-type carbonic anhydrase
  misc_feature: Functional Homolog Of Ceres CLONE ID no. 97982 at SEQ ID NO. 114
MGKLAIQLLFLITFFLVLVSRILPATSQEVEDEADFNYDPNGEKGPANWGRIHPEWGACSNGSMQSPIDLLSERVDVVSHLGRLSRSYKPANATLRNRGHDMMLKWEGAAGSIEINGTEYLLKQCHWHSPSEHTINGKRLALEVHMVHESLDGKVAVVGIMYMIGRPDSFLSSLTKQLQSVAGTYERDTVAGVVDPRNIKIGSRKYYRYIGSLTIPPCTENVLWTIVRKVRTATREQVRMLRVAVHDESDTNARQIQPINSRTVKLFRPEDKDD

SEQ ID NO: 227 - DNA, 744 bp, Populus balsamifera subsp. trichocarpa
  misc_feature: Ceres ANNOT ID no.1515413
  misc_feature: Encodes the peptide sequence at SEQ ID NO 228
atgggaaagctagcaatccagctcctctttttgatcactttcttcctcgttcttgtttcgcgtatcctcccggcaacatctcaagaagttgaggacgaggcagactttaattatgatccaaatggggagaagggacctgctaactggggaaggattcaccctgagtggggtgcttgtagcaatggatctatgcagtctcctatcgatctgttgagcgaaagagtcgatgtggtgtcccatttggggagactcagtagaagttacaagcctgctaatgccactcttaggaatcggggccatgatatgatgctgaaatgggaaggtgctgcaggaagcattgaaataaatggaactgaatatctactcaaacagtgccactggcattcaccttcggaacatacaatcaatggcaagaggcttgctttagaggtgcacatggttcatgagagccttgatggaaaggttgctgttgttgggattatgtacatgataggaaggccagactctttcctgtcatctttgacaaaacaattacaatcggttgctggcacctatgaacgagatacagtggcgggagtagttgatccaaggaacatcaagataggcagcagaaagtattacagatacattggctcccttacaattccaccttgcactgaaaatgttctgtggaccattgttagaaaggtgaggactgccacaagagaacaagttagaatgcttcgtgtagctgttcatgattag

SEQ ID NO: 228 - protein, 247 aa, Populus balsamifera subsp. trichocarpa
  misc_feature: Ceres ANNOT ID no.1515413
  misc_feature: Bit score of 506.4 for HMM based on sequences of FIGURE 5.
  misc_feature (203)..(242): Pfam Name: Carb_anhydrase Pfam Description: Eukaryotic-type carbonic anhydrase
  misc_feature: Functional Homolog Of Ceres CLONE ID no. 97982 at SEQ ID NO. 114
MGKLAIQLLFLITFFLVLVSRILPATSQEVEDEADFNYDPNGEKGPANWGRIHPEWGACSNGSMQSPIDLLSERVDVVSHLGRLSRSYKPANATLRNRGHDMMLKWEGAAGSIEINGTEYLLKQCHWHSPSEHTINGKRLALEVHMVHESLDGKVAVVGIMYMIGRPDSFLSSLTKQLQSVAGTYERDTVAGVVDPRNIKIGSRKYYRYIGSLTIPPCTENVLWTIVRKVRTATREQVRMLRVAVHD

SEQ ID NO: 229 - DNA, 960 bp, Glycine max
  misc_feature: Ceres CLONE ID no.593224
  misc_feature: Encodes the peptide sequence at SEQ ID NO 230
acagctagctattcacaatggccctgcgggttcatttctcaatagtttccatagcggttttggctctatgcacttctgcagattacttttcggctaattttagctatgctggtccaaatggacctgagtactggggaagcttgagtccatcttatgcagcatgctcacatgggaaatctcagagtcctgtggaacttatgaagactgatattgtcatcaacaagcagttgaagaatctaaacagaaactaccttcctaccaatgccacacttgttgacaacatattcaacattggggtgcactttgaaggaaaagtaggggatattaatataaatggaaaaaattactccttaaaacaattgcactggcattctccatcagagcacatggcaaatggtcgtatacatgacgcggagctccatctagtccacctgaccgaagataattacaacatagcagttgtggcagtgctctacaaattgggtgatccagaccctctcatatcccagtttgaagacaagttggttgatttagagaaggagattcgtgcaggcaataaggatgcccaaattgcaattggcacctttgatgtagaagagataaacagaagcagccataggtattatagatatgttggctctcttaccactccaccgtgcaaagagggtgtcacttggaacattctaggcaagttaaggacgctatccaagaaacaactagagctccttaaggcaccattgggcccagagtttaagcacaacgcaaggcctcttcagcaattgaatggacgtaaaattcagatgtactatcaccccaaccacctgcatggttcgcatgcaacaccatccaagtatcataaataaattgcttgatgatgatcatactggttttgcatcagaaaatattgggtttgatcggctagtacacaatgctagtgcctatttgatttagtttattctt

SEQ ID NO: 230 - protein, 281 aa, Glycine max
  misc_feature: Ceres CLONE ID no.593224
  misc_feature: Bit score of 564.7 for HMM based on sequences of FIGURE 5.
  misc_feature (29)..(264): Pfam Name: Carb_anhydrase Pfam Description: Eukaryotic-type carbonic anhydrase
  misc_feature: Functional Homolog Of Ceres CLONE ID no. 97982 at SEQ ID NO. 114
MALRVHFSIVSIAVLALCTSADYFSANFSYAGPNGPEYWGSLSPSYAACSHGKSQSPVELMKTDIVINKQLKNLNRNYLPTNATLVDNIFNIGVHFEGKVGDININGKNYSLKQLHWHSPSEHMANGRIHDAELHLVHLTEDNYNIAVVAVLYKLGDPDPLISQFEDKLVDLEKEIRAGNKDAQIAIGTFDVEEINRSSHRYYRYVGSLTTPPCKEGVTWNILGKLRTLSKKQLELLKAPLGPEFKHNARPLQQLNGRKIQMYYHPNHLHGSHATPSKYHK

SEQ ID NO: 231 - DNA, 846 bp, Sorghum bicolor
  misc_feature: Ceres ANNOT ID no.6014891
  misc_feature: Encodes the peptide sequence at SEQ ID NO 232
atgtctccagctcgccgccaccacctccacctcggcgtcgcagcgctcctagctgccgccgtcctgctctccgccgccgtgccggctgccagagcgcaggaaaccgagcatgaggaggagttcagctacatccccggcgacgagcacgggccggagcactggggacgcatcaaagaggagtgggcggcgtgcggcacggggcgattgcagtcgcccatcgacctctcccacgagcgcgtctcgctggtgcgctccctcggctacctccaccactcctaccgccccgccgaggcatccatcgtcaaccgcggccacgacatcatggtgaggttcgagggcgacgccgggagccttgtgatcaacggcacggcgtactacctgaagcagctgcactggcactcgcccgccgagcacaccgtggacggccgcaggtacgacatggagctgcacctggtgcacgagagcgccgacaagaaggccgcggtgatcgccatcctctacgaggtcggccgccacgaggacgcgttcctccgccacctggagcccttcatcaggcggatcgccgacgtgcgagacagggaggagcgcgtcggcgtggtcgacccgcggcgcgcgcgcggcacggccagcgtctactaccgctacatgggctcgctcaccgcgccgccctgcaccgagggggtcatctggaccatcgtcaagagggttcgcagcgtgtccaagtaccagctggagcttctcagggaagccgtgcacgacgacatggagaacaatgcgaggccgcttcaggaggcgaacaacagacacatcagcatcttccgtcctaagcccgataagcattattag

SEQ ID NO: 232 - protein, 281 aa, Sorghum bicolor
  misc_feature: Ceres ANNOT ID no.6014891
  misc_feature: Bit score of 702.6 for HMM based on sequences of FIGURE 5.
  misc_feature (46)..(273): Pfam Name: Carb_anhydrase Pfam Description: Eukaryotic-type carbonic anhydrase
  misc_feature: Functional Homolog Of Ceres CLONE ID no. 97982 at SEQ ID NO. 114
MSPARRHHLHLGVAALLAAAVLLSAAVPAARAQETEHEEEFSYIPGDEHGPEHWGRIKEEWAACGTGRLQSPIDLSHERVSLVRSLGYLHHSYRPAEASIVNRGHDIMVRFEGDAGSLVINGTAYYLKQLHWHSPAEHTVDGRRYDMELHLVHESADKKAAVIAILYEVGRHEDAFLRHLEPFIRRIADVRDREERVGVVDPRRARGTASVYYRYMGSLTAPPCTEGVIWTIVKRVRSVSKYQLELLREAVHDDMENNARPLQEANNRHISIFRPKPDKHY

SEQ ID NO: 233 - DNA, 846 bp, Sorghum bicolor
  misc_feature: Ceres ANNOT ID no.6014889
  misc_feature: Encodes the peptide sequence at SEQ ID NO 234
atgtctccagctcgccgccacccctgccatgccatcgcggcgctcctcgctgctgccgtcctgctctccgccgccgtgccggctgccagagcgcaggaaaccgagcatgaggaggagttcagctacatccccggcgacgagcacgggccggagcactggggacacatcaaggcggagtgggcggcgtgcggcacggggcgaatgcagtcgcccatcgacctctcccacgagcgcgtctcgctggtgcgctccctcggctacctccaccactcctaccgccccgccgaggcctccatcgtcaaccgcggccacgacatcatggtgaggttcgagggcgacgccgggagccttgtgatcaacggcacggcgtactacctgaagcagctgcactggcactcgccggccgagcacaccgtggatgggcacaggcacgacatggagctgcacctggtgcacgagagcgccgatgacaagaaggccgcggtgatcgccatcctctacgaggtcggccgccacgaggacgcgttcctccgccatctggagcccttcatcaggcggatcgccgacgtgcgagaccgggaggagcgcgtcggcgtggtcgacccgcggcgcgcgcgcggcacggccagcgtctactaccgctacatgggctcgctcaccgcgccgccctgcaccgagggggtcatctggaccatcgtcaagagggttcgcagcgtgtccaagtaccagctggagcttctcagggaagccgtgcacgacgacatggaggacaacgcgaggccgcttcaggaggcgaacaacagacgcatcagcatcttccgtcctaagcccgataagcattattag

SEQ ID NO: 234 - protein, 281 aa, Sorghum bicolor
  misc_feature: Ceres ANNOT ID no.6014889
  misc_feature: Bit score of 685.8 for HMM based on sequences of FIGURE 5.
  misc_feature (45)..(273): Pfam Name: Carb_anhydrase Pfam Description: Eukaryotic-type carbonic anhydrase
  misc_feature: Functional Homolog Of Ceres CLONE ID no. 97982 at SEQ ID NO. 114
MSPARRHPCHAIAALLAAAVLLSAAVPAARAQETEHEEEFSYIPGDEHGPEHWGHIKAEWAACGTGRMQSPIDLSHERVSLVRSLGYLHHSYRPAEASIVNRGHDIMVRFEGDAGSLVINGTAYYLKQLHWHSPAEHTVDGHRHDMELHLVHESADDKKAAVIAILYEVGRHEDAFLRHLEPFIRRIADVRDREERVGVVDPRRARGTASVYYRYMGSLTAPPCTEGVIWTIVKRVRSVSKYQLELLREAVHDDMEDNARPLQEANNRRISIFRPKPDKHY

SEQ ID NO: 235 - DNA, 1086 bp, Triticum aestivum
  misc_feature: Ceres CLONE ID no.686770
  misc_feature: Encodes the peptide sequence at SEQ ID NO 236
acacactagagaaactcaccagctccacgggcagaggagccgacacccaacccagcccaacgcaggcacgccaagaccaggagagagacaacatgcgtccatcacgggatcttcgcctcgccgtgcttctcctcttctccgcagccgtcctcctctcggcagtcccggcggccagagcccagcaggaaaccgaggaggaggaggagttcagctactcgctggacgcggagaatgggccggcgcactggggcgacatcaaggaggagtggtccgcgtgcggcaagggcaacatgcagtcgcccatcgaccttgccagcccgcgtgtctccctcgtgcgcggcctcggctacctcaaccactcctactcccccgccaacgccaccatcatcaaccgcggccacgacatcatgctcaagttcgagggcgacgccgggagcgtctccatcggcggtacgccctacttcctccggcagctgcactggcactcgcccactgagcatagcgtcaacggccgtcggtacgacatggagctccacatgttccacgagagcgctcagggcaaagcagccgtcatcggcgtcttctacgagatcggsgcccacgacgccttcctacacaagctggagccatacctggagatgatagcggatcgcaaggacagggaggagaagatgggcatgatggatcccaggggcgccagaggcaaggccagcgtctactaccgctacgtgggctccctcaccaccccaccctgctcagaaggggtcatstggaccatcatcaagagggtccgcactgtgtcgaggcaccagctggagcttctacgggaggccgttcacgacgacatggagaagaacgcgaggccccgtcaggaggtgaacagcagagatatcagcatgtcccggccttttgaccaaaatagacattcatcattagctagggtcgattctctacttaattagtttgttgttacagttattgtatatgcacatggttataccattttttgtagttttttcttcccatattagatgccttgtatccagtcattgaataataaaggaccacgtccagtatatttccatg

SEQ ID NO: 236 - protein, 289 aa, Triticum aestivum
  misc_feature: Ceres CLONE ID no.686770
  misc_feature: Bit score of 675.5 for HMM based on sequences of FIGURE 5.
  misc_feature (44)..(271): Pfam Name: Carb_anhydrase Pfam Description: Eukaryotic-type carbonic anhydrase
  misc_feature: Functional Homolog Of Ceres CLONE ID no. 97982 at SEQ ID NO. 114
  misc_feature (168)..(168): Xaa is any aa, unknown, or other
  misc_feature (226)..(226): Xaa is any aa, unknown, or other
MRPSRDLRLAVLLLFSAAVLLSAVPAARAQQETEEEEEFSYSLDAENGPAHWGDIKEEWSACGKGNMQSPIDLASPRVSLVRGLGYLNHSYSPANATIINRGHDIMLKFEGDAGSVSIGGTPYFLRQLHWHSPTEHSVNGRRYDMELHMFHESAQGKAAVIGVFYEIXAHDAFLHKLEPYLEMIADRKDREEKMGMMDPRGARGKASVYYRYVGSLTTPPCSEGVXWTIIKRVRTVSRHQLELLREAVHDDMEKNARPRQEVNSRDISMSRPFDQNRHSSLARVDSLLN

SEQ ID NO: 237 - DNA, 1129 bp, Zea mays
  misc_feature: Ceres CLONE ID no.1060795
  misc_feature: Encodes the peptide sequence at SEQ ID NO 238
aaacacaaagactcaccagctccacgagcagaggagccgacacccaacccagcccggccaggagagagacaacatgcgttcatctcgggacctccggctcgccgtgctcctcctcctcttctcggcgtccgtcctcctcccggtagccagagcccagcaggaaaccgaggaggaggaggagttcagctactcgctggacgcggagaatgggcctgcgcactggggcgacatcaaggaggagtggtccgcatgcggcaagggcaacatgcagtcgcccatcgacctcgccagcccgcgcgtctccctcgtgcgcggcctcggctacctcaaccactcctaccaccctgccaacgccaccatcgtcaaccgcggccacgacatcatgctcaagttcgagggcgacgccgggagcgtctccatcggcggcacgccctacttcctccggcagctgcactggcactcccccaccgagcacagcgtcaacggccgccggtacgacatggagctccacatgttccacgagagcgctcagggcaaggccgccgtgatcggcgtcttctatgagattggtgcccatgacgccttcctgcacaagctggagccatacctggagatgatagcggatcgcaaggacagagaggagaagatgggcatgatggatcccaggggcgccagaggaaaggccagcgtgtactatcgctacgtgggctccctcaccgccccaccctgcgcggaaggggtcatctggaccatcgtcaagagggtgcgcactgtgtcgaggcaccagctggagcttctcagggaggccgttcacgacgacatggagaagaacgcgaggccccgtcaggaggtgaacagcagagatatcagcatgttccgaccttttgagcaaaatagacattgattactagtgttgatcctctggctaattagtctggtgcttcagctattttttatgtacatggttatatcatttctgtacgcagtagtgattttgcatccactttgataacttgtatacggttactgaataataatggaacgcgtccagttcatgtccatgcatatcttcatgtttccatgttgggatctgccagatcgtcgaaatgaaaaaaactggcaaggattt

SEQ ID NO: 238 - protein, 276 aa, Zea mays
  misc_feature: Ceres CLONE ID no.1060795
  misc_feature: Bit score of 679.7 for HMM based on sequences of FIGURE 5.
  misc_feature (42)..(268): Pfam Name: Carb_anhydrase Pfam Description: Eukaryotic-type carbonic anhydrase
  misc_feature: Functional Homolog Of Ceres CLONE ID no. 97982 at SEQ ID NO. 114
MRSSRDLRLAVLLLLFSASVLLPVARAQQETEEEEEFSYSLDAENGPAHWGDIKEEWSACGKGNMQSPIDLASPRVSLVRGLGYLNHSYHPANATIVNRGHDIMLKFEGDAGSVSIGGTPYFLRQLHWHSPTEHSVNGRRYDMELHMFHESAQGKAAVIGVFYEIGAHDAFLHKLEPYLEMIADRKDREEKMGMMDPRGARGKASVYYRYVGSLTAPPCAEGVIWTIVKRVRTVSRHQLELLREAVHDDMEKNARPRQEVNSRDISMFRPFEQNRH

SEQ ID NO: 239 - protein, 269 aa, Lotus japonicus
  misc_feature: Public GI ID no.152955979
  misc_feature: Bit score of 617.5 for HMM based on sequences of FIGURE 5.
  misc_feature (42)..(265): Pfam Name: Carb_anhydrase Pfam Description: Eukaryotic-type carbonic anhydrase
  misc_feature: Functional Homolog Of Ceres CLONE ID no. 97982 at SEQ ID NO. 114
MTLPTNHNLFSLVFLVTILCSSLFLTTTASESKGEEYIYTKGARNGPENWGSLKPEWEVCRNGKSQSPIDIKNVEGFSQLGKLKKDYKVAPATLKNRGHDIMLQWDGDAGKLNINGTYYKFVQSHWHTPSEHTLNGSKFDMEMHAVHENSKGERAVIGIWYTIGQPDPLLSKLLDNIKLSGDNKDIDLGILNPGLIKFGSRKYYRYVGSLTTPPCSEGVIWTIVKKVRTVSREQLKALKEAVHDGFEINARPTQELNGRKVWLYTPNVV

SEQ ID NO: 240 - DNA, 1148 bp, Panicum virgatum
  misc_feature: Ceres CLONE ID no.1913328
  misc_feature: Encodes the peptide sequence at SEQ ID NO 241
acaaatcagctcaacgaccaaagagcgtctagccgcccgccgcccgccgcccgcgctcgcaaaggagaccaacagacagacaccgcgcggcgcgcagcatgcgtccagtagctcgccacgtcggcctcgcggcggccgcgctcctcgccgccgccctcctgctcggcggcgccgccagggcgcaggaggagacggagcacgaggaggagttcagctacgcccgcggcggcgagcacgggccggagcactggggcgagatcaagccggagtgggcggcgtgcggcgccgggcggatgcagtcgcccatcgacctctcccacgagcgcgtctcgctggtgcgctccctcggctacctcgaccacgcctaccgccccgcccaggcctccatcgtcaaccgcggccacgacatcatggtgaggttcgaggacgacgccggcggcctggtgatcaacggcacggcgtaccagctgaagcagctgcactggcactcgcccaccgagcacaccgtcgacggccgccgctacgacctggagctgcacctggtgcacgagagcgccgagggcaaggccgccgtgatcggcatcctctacgaggccggcggccgccgcgacccgctcctccaccagatggagccgttcatcaggcggatcgccgacaagcgggaccgggaggagcgcgtcggcgtggtggacccccgcgccgtgcgcggcagggccagcgtgtactaccggtacatgggctccctcaccgtgccgccctgcaccgagggggtcatctggaccatcctcaagagggttcagaccgtgtccaagtaccaactggagcttctcagggaagccgtgcacgatgacatggagaagaacgcgaggccactccaggaggtcaacagcagagacgtcagcatcttccggcctagcgcccgtaaacactagtaggcccttggtagtgatgtgcgggctgacgtggatgcgccagtagtaatgtactgtagttcagagtagtgtggctgatgaatattatttgtaattctttctatttatgtgcctttattcgttacatgcgtaaatagtgaaggcattatcacttcatgtcaaagttgatgtccatgttataaccagtaggggactcaccactcctgttccatcaac

SEQ ID NO: 241 - protein, 277 aa, Panicum virgatum
  misc_feature: Ceres CLONE ID no.1913328
  misc_feature: Bit score of 691.4 for HMM based on sequences of FIGURE 5.
  misc_feature (43)..(270): Pfam Name: Carb_anhydrase Pfam Description: Eukaryotic-type carbonic anhydrase
  misc_feature: Functional Homolog Of Ceres CLONE ID no. 97982 at SEQ ID NO. 114
MRPVARHVGLAAAALLAAALLLGGAARAQEETEHEEEFSYARGGEHGPEHWGEIKPEWAACGAGRMQSPIDLSHERVSLVRSLGYLDHAYRPAQASIVNRGHDIMVRFEDDAGGLVINGTAYQLKQLHWHSPTEHTVDGRRYDLELHLVHESAEGKAAVIGILYEAGGRRDPLLHQMEPFIRRIADKRDREERVGVVDPRAVRGRASVYYRYMGSLTVPPCTEGVIWTILKRVQTVSKYQLELLREAVHDDMEKNARPLQEVNSRDVSIFRPSARKH

SEQ ID NO: 242 - DNA, 1068 bp, Panicum virgatum
  misc_feature: Ceres CLONE ID no.2017488
  misc_feature: Encodes the peptide sequence at SEQ ID NO 243
aaaatcagctcaacgaccgaagagagactagccgcccgccgcccgcgctcgcaaaggagaccgacaccgcgcggcgcaccaaccatgcgtccagtagcagctcgccacctcggcctcgcggcggccgcgctcctcgccgccgccgccctcctgcttgtcgccgccgcgccggcagccagggcacaggaggagacggagcacgaggaggagttcagctacgccggcggcgacgcgcacgggccggagcactggggcgagatcaagcccgagtgggcggcgtgcggcgcggggcggatgcagtcgcccatcgacctcgcccaccaccgcgtctcgctggtgcgcgccctcggcttcctcgaccacgcctaccgccccgccgaggcctccatcgtgaaccgcggccacgacatcatggtgaggttcgagggcgacgccggcgacctggtgatcaacggcacggcgtaccacctgaagcagctgcactggcactcgcccaccgagcacaccgtcgacggccgccgctacgacctggagctgcacatggtgcacgagagcgccgagggcaaggccgccgtggtcggcttcctctacgaggtcggcggccgccgcgacccgctcctccgccagatggagccgttcatcaggcggatcgccgacaagcgggaccgggaggagcgcgtcggggtggtggacccccgcgccgtgcgcggcagggccagcgtgtactaccggtacatgggctccctcaccgtgccgccctgcaccgagggggtcatctggaccatccttaagagggttcagaccgtgtccaagtaccaactggagcttctcagggaagccgtgcacgatgacatggagaagaacgcgaggccgcttcaggaggtcaacagcagagacgtcagcatcttccggccaagcgcccataaacactattagtcgttcagagtagtgtggctgatgaagattttttttttgtaattccttctatatttttttttgtaattccttctatttctgtgcatttatttattatatgggtaaataatgaagatattactctatttgatt

SEQ ID NO: 243 - protein, 283 aa, Panicum virgatum
  misc_feature: Ceres CLONE ID no.2017488
  misc_feature: Bit score of 672.0 for HMM based on sequences of FIGURE 5.
  misc_feature (48)..(275): Pfam Name: Carb_anhydrase Pfam Description: Eukaryotic-type carbonic anhydrase
  misc_feature: Functional Homolog Of Ceres CLONE ID no. 97982 at SEQ ID NO. 114
MRPVAARHLGLAAAALLAAAALLLVAAAPAARAQEETEHEEEFSYAGGDAHGPEHWGEIKPEWAACGAGRMQSPIDLAHHRVSLVRALGFLDHAYRPAEASIVNRGHDIMVRFEGDAGDLVINGTAYHLKQLHWHSPTEHTVDGRRYDLELHMVHESAEGKAAVVGFLYEVGGRRDPLLRQMEPFIRRIADKRDREERVGVVDPRAVRGRASVYYRYMGSLTVPPCTEGVIWTILKRVQTVSKYQLELLREAVHDDMEKNARPLQEVNSRDVSIFRPSAHKHY

SEQ ID NO: 244 - protein, 275 aa, Oryza sativa subsp. indica
  misc_feature: Public GI ID no.125561861
  misc_feature: Bit score of 637.0 for HMM based on sequences of FIGURE 5.
  misc_feature (35)..(268): Pfam Name: Carb_anhydrase Pfam Description: Eukaryotic-type carbonic anhydrase
  misc_feature: Functional Homolog Of Ceres CLONE ID no. 97982 at SEQ ID NO. 114
MHSSTRARLLLAAAVLLLSAAPAARAQETDDERKFGYVPGTENGPGNWSRLDPRWAKCNTGNMQSPIDLSHERLMRNLGYLDYSYLPAEASMVNRGHDIEVKFMGNAGRVVINGKAYKLKQLHWHTPSEHTVNGRRYDMELHLVHDDGNSNTVVIGNLYQIGNPDPFLLMLEPFIRRIADTKDRSEPIGVVDPQLAKSPDAVYYRYMGSLTTPPCTEGVIWTVFKRVFLLAQTVAQYQLDLLREAVADGYENNARPLQKVNNRNISIFIPDPKKD

SEQ ID NO: 245 - protein, 275 aa, Oryza sativa subsp. japonica
  misc_feature: Public GI ID no.42408633
  misc_feature: Bit score of 691.1 for HMM based on sequences of FIGURE 5.
  misc_feature (40)..(267): Pfam Name: Carb_anhydrase Pfam Description: Eukaryotic-type carbonic anhydrase
  misc_feature: Functional Homolog Of Ceres CLONE ID no. 97982 at SEQ ID NO. 114
MGSTRLLVLLAAASLLLATAVPAARAQEETDHEEEFTYISGDEKGPEHWGKLKPEWAQCGAGEMQSPIDLSHERVKLVRDLGYLDDSYRAAEASIVNRGHDIMVRFDGDAGSVVINGTAYYLRQLHWHSPTEHSVDGRRYDMELHMVHESAEKKAAVIGLLYEVGRPDRFLQKMEPYLKMIADKEDREEKVGMIDPRGARGRASVYYRYMGSLTTPPCTQGVVWTIVKRVRTVSRYQLDLLREAVHDEMENNARPLQAVNNRDISIFRPYPHKRY

SEQ ID NO: 246 - protein, 273 aa, Dioscorea alata
  misc_feature: Public GI ID no.7533036
  misc_feature: Bit score of 611.1 for HMM based on sequences of FIGURE 5.
  misc_feature (202)..(263): Pfam Name: Carb_anhydrase Pfam Description: Eukaryotic-type carbonic anhydrase
  misc_feature: Functional Homolog Of Ceres CLONE ID no. 97982 at SEQ ID NO. 114
MSSPTLLHLLLLSSLLFSCLPNAKPQQAEDEFSYIEGSPNGPENWGSLKPEWKTCGNGMEQSPIQLRDNRVILDQTLGKLRRNYRATDARLRNSGHDVLVEFKNNAGSLSINRVAYQLKRIHFHSPAEHEMNGERFDLEAQLVHESQDQKRAVVSILFRFGPADPFLSDLEDFIRQLSNSQKNEINAGVVDPNQLQIDDSAYYRYMGSYTAPPCTEDITWTVIKKLGTVSPKQVLMLKQAVNENSINNARPLQPTNFRSVFYFEQLKSKLGVI

SEQ ID NO: 247 - protein, 272 aa, Dioscorea alata
  misc_feature: Public GI ID no.7330291
  misc_feature: Bit score of 572.5 for HMM based on sequences of FIGURE 5.
  misc_feature (201)..(262): Pfam Name: Carb_anhydrase Pfam Description: Eukaryotic-type carbonic anhydrase
  misc_feature: Functional Homolog Of Ceres CLONE ID no. 97982 at SEQ ID NO. 114
MSSPTLLHLFLLSSLLFSCFSNARLDGEDEFSYIEGSPNGPENWGSLKPEWKTCGNGMEQSPIQLRDNGVIFDQTLGKLRRDYRATDARLRNSGHDVLVEFKNNAGSLSINRVAYQLKRIHFHSPAEHEMNGERFDLEAQLVHESQDQKRAAVSILFRFGPADPFLSDLEDFIRQLSNSQKNEINAGVVDPNQLQIDDSAYYRYMGSFTAPPCSEGISWTVMRKVATVSPRQVLLLKQTVNENAINNARPLQPTNFRSVFYFEQLKSKLGVI

SEQ ID NO: 248 - DNA, 1619 bp, Zea mays
  misc_feature: Ceres CLONE ID no. 258034
  misc_feature Encodes the peptide sequence at SEQ ID NO 181
aaactcccgcggtgccgcgcctcgctttcgcatccccccgcggagaggagaggaagaagaacccagccaaatcctcagtcctcaggcagtcaggctgctcgcagctcgtgccgtccactctcccccgaggcagtctcttgcgttcgctgctcgacatggcgctccaggcggcgacgtccttcctcccctctgccctctccgcgcgcaaggaggggtcggtgaaggactcggcgtcgttcttgggtgttcgtctcgcggcggatggcctcaagctggacaccaccgctctgggcctacgcaccgtgagggtgagcaggtcggcggacatccgcgcgcagacggcagcggtgtcctccccgtcagtgacccccgcgtcgccgtctggcaagaagaccctccgcaagggcacggcggtcatcaccggcgcgtcgtccggcctcggcctcgccacggcgaaggccctggcggagacaggcaagtggcacgtcatcatggcctgccgcgacttcctcaaggcgtcgcgcgcggccaaggcggccggcatggacaaggacagcttcaccgtcgtgcacctggacctcgcctccctggacagcgtccgccagttcgtcaggaacgtgcgccagctggagatgcccatcgacgtggtggtctgcaacgccgccgtgtaccagcccaccgccaaggagccgtcctacaccgccgacggcttcgagatgagcgtcggcgtcaaccacctcggccacttcctcctcgcgcgcgagctcctcagcgacctccagtcctccgactacccctctaagcgcctcatcatcgtcggctccatcaccgggaacacgaacacgctggcggggaacgtgcccccgaaggcgaacctgggcgacctgcgcggcctcgccggcggcctcaacggcgttggcagctcggtgatgatcgacggcggggagttcgacggcgccaaggcatacaaggacagcaaggtgtgcaacatgctgacgatgcaggagttccaccgccggtaccacgaggagacgggcgtgaccttcgcgtcgctctacccgggctgcatcgccaccacgggcctgttccgcgagcacatcccgctgttccgcctgctcttccccccgttccagaagtacatcaccaaggggtacgtctccgaggaggaggccgggaagcggctggcgcaggtggtgagcgaccccagcctgaccaagtccggcgtgtactggagctggaacaagaactccgcgtccttcgagaaccagctctctgaggaggccagcgacgccgacaaggccaagaagctctgggagatcagcgagaagctcgtcggcttggcgtgatgcccaccgtggccggcgtcggcagccggcgacagtttttcctacctaggacatgctcattagttggtctcagtcgagtagtcgacgtgtggtgcgcccgtgtcagagtgccaagccaagacagaaagtgagtacaaacgtgtaaaatatgtgctactgcgacgtgatggtttgggcagtggactgtatgtatctctactctctaggcttctgctttgctttgcatatttaattttctgctaataagaggacagcaaatgcctttcgagcttc

1.-44. (canceled)

45. A plant cell comprising an exogenous nucleic acid comprising a nucleotide sequence encoding a polypeptide having 80 percent or greater sequence identity to an amino acid sequence selected from the group consisting of SEQ ID NOs:96-98, SEQ ID NO:100, SEQ ID NOs:102-103, SEQ ID NOs:106-110, SEQ ID NO:112, SEQ ID NO:114, SEQ ID NO:116, SEQ ID NOs:118-119, SEQ ID NO:122, SEQ ID NOs:125-126, SEQ ID NO:128, SEQ ID NO:131, SEQ ID NOs:133-134, SEQ ID NO:136, SEQ ID NO:138, SEQ ID NOs:140-141, SEQ ID NOs:143-146, SEQ ID NO:148, SEQ ID NO:150, SEQ ID NO:152, SEQ ID NO:154, SEQ ID NOs:156-157, SEQ ID NO:159, SEQ ID NO:161, SEQ ID NO:163, SEQ ID NO:165, SEQ ID NOs:167-175, SEQ ID NO:177, SEQ ID NOs:179-182, SEQ ID NO:184, SEQ ID NO:186, SEQ ID NO:186, SEQ ID NOs:188-189, SEQ ID NO:191, SEQ ID NOs:193-205, SEQ ID NOs:207-210, SEQ ID NOs:212-220, SEQ ID NO:222, SEQ ID NO:224, SEQ ID NO:226, SEQ ID NO:228, SEQ ID NO:230, SEQ ID NO:232, SEQ ID NO:234, SEQ ID NO:236, SEQ ID NOs:238-239, SEQ ID NO:241, and SEQ ID NOs:243-247, wherein a tissue of a plant produced from said plant cell has a difference in the level of protein as compared to the corresponding level in tissue of a control plant that does not comprise said nucleic acid.

46. A plant cell comprising an exogenous nucleic acid comprising a nucleotide sequence encoding a polypeptide having 80 percent or greater sequence identity to an amino acid sequence selected from the group consisting of SEQ ID NOs:96-98, SEQ ID NO:100, SEQ ID NO:102, SEQ ID NO:106, SEQ ID NO:108, SEQ ID NO:110, SEQ ID NO:112, SEQ ID NO:114, SEQ ID NO:116, SEQ ID NOs:118-119, SEQ ID NO:122, SEQ ID NO:125, SEQ ID NO:128, SEQ ID NO:131, SEQ ID NOs:133-134, SEQ ID NO:136, SEQ ID NO:138, SEQ ID NO:140, SEQ ID NO:143, SEQ ID NO:148, SEQ ID NO:150, SEQ ID NO:152, SEQ ID NO:154, SEQ ID NO:156, SEQ ID NO:159, SEQ ID NO:161, SEQ ID NO:163, SEQ ID NO:165, SEQ ID NO:167, SEQ ID NO:177, SEQ ID NO:179, SEQ ID NO:181, SEQ ID NO:184, SEQ ID NO:186, SEQ ID NO:188, SEQ ID NO:191, SEQ ID NO:193, SEQ ID NO:207, SEQ ID NO:212, SEQ ID NO:222, SEQ ID NO:224, SEQ ID NO:226, SEQ ID NO:228, SEQ ID NO:230, SEQ ID NO:232, SEQ ID NO:234, SEQ ID NO:236, SEQ ID NO:238, SEQ ID NO:241, and SEQ ID NO:243, wherein a tissue of a plant produced from said plant cell has a difference in the level of protein as compared to the corresponding level in tissue of a control plant that does not comprise said nucleic acid.

47. A plant cell comprising an exogenous nucleic acid comprising a nucleotide sequence having 80 percent or greater sequence identity to a nucleotide sequence corresponding to SEQ ID NO:115, wherein a tissue of a plant produced from said plant cell has a difference in the level of protein as compared to the corresponding level in tissue of a control plant that does not comprise said nucleic acid.

48. A plant cell comprising an exogenous nucleic acid comprising a nucleotide sequence having 80 percent or greater sequence identity to a nucleotide sequence selected from the group consisting of SEQ ID NO:95, SEQ ID NO:99, SEQ ID NO:101, SEQ ID NO:104, SEQ ID NO:105, SEQ ID NO:111, SEQ ID NO:113, SEQ ID NO:115, SEQ ID NO:117, SEQ ID NO:120, SEQ ID NO:121, SEQ ID NO:123, SEQ ID NO:124, SEQ ID NO:127, SEQ ID NO:129, SEQ ID NO:130, SEQ ID NO:132, SEQ ID NO:135, SEQ ID NO:137, SEQ ID NO:139, SEQ ID NO:142, SEQ ID NO:147, SEQ ID NO:149, SEQ ID NO:151, SEQ ID NO:153, SEQ ID NO:155, SEQ ID NO:158, SEQ ID NO:160, SEQ ID NO:162, SEQ ID NO:164, SEQ ID NO:166, SEQ ID NO:176, SEQ ID NO:178, SEQ ID NO:183, SEQ ID NO:187, SEQ ID NO:190, SEQ ID NO:192, SEQ ID NO:206, SEQ ID NO:211, SEQ ID NO:221, SEQ ID NO:223, SEQ ID NO:225, SEQ ID NO:227, SEQ ID NO:229, SEQ ID NO:231, SEQ ID NO:233, SEQ ID NO:235, SEQ ID NO:237, SEQ ID NO:240, SEQ ID NO:242, and SEQ ID NO:248, wherein a tissue of a plant produced from said plant cell has a difference in the level of protein as compared to the corresponding level in tissue of a control plant that does not comprise said nucleic acid.

49. The plant cell of claim 45, wherein said sequence identity is 85 percent or greater.

50. The plant cell of claim 49, wherein said sequence identity is 90 percent or greater.

51. The plant cell of claim 50, wherein said sequence identity is 95 percent or greater.

52. The plant cell of claim 46, wherein said nucleotide sequence encodes a polypeptide comprising an amino acid sequence corresponding to SEQ ID NO:96, SEQ ID NO:102, SEQ ID NO:112, SEQ ID NO:114, SEQ ID NO:116, SEQ ID NO:118, SEQ ID NO:128, or SEQ ID NO:181.

53. The plant cell of claim 47, wherein said exogenous nucleic acid comprises a nucleotide sequence corresponding to SEQ ID NO:115.

54. The plant cell of claim 45, wherein said difference is an increase in the level of protein.

55. The plant cell of claim 45, wherein said exogenous nucleic acid is operably linked to a regulatory region.

56. The plant cell of claim 55, wherein said regulatory region is a promoter.

57. The plant cell of claim 56, wherein said promoter is a tissue-preferential, broadly expressing, or inducible promoter.

58. The plant cell of claim 57, wherein said promoter is a maturing endosperm promoter.

59. The plant cell of claim 45, wherein said plant is a dicot.

60. The plant cell of claim 59, wherein said plant is a member of the genus Arachis, Brassica, Carthamus, Glycine, Gossypium, Helianthus, Lactuca, Linum, Lycopersicon, Medicago, Olea, Pisum, Solanum, Trifolium, or Vitis.

61. The plant cell of claim 45, wherein said plant is a monocot.

62. The plant cell of claim 61, wherein said plant is a member of the genus Avena, Elaeis, Hordeum, Musa, Oryza, Phleum, Secale, Sorghum, Triticosecale, Triticum, or Zea.

63. The plant cell of claim 52, wherein said plant is a member of the genus Oryza.

64. The plant cell of claim 45, wherein said tissue is seed tissue.

65. A transgenic plant comprising the plant cell of claim 45.

66. Progeny of the plant of claim 65, wherein said progeny has a difference in the level of protein as compared to the level of protein in a corresponding control plant that does not comprise said nucleic acid.

67. Seed from a transgenic plant according to claim 66.

68. Vegetative tissue from a transgenic plant according to claim 65.

69. A food product comprising seed or vegetative tissue from a transgenic plant according to claim 65.

70. A feed product comprising seed or vegetative tissue from a transgenic plant according to claim 65.

71. An isolated nucleic acid comprising a nucleotide sequence having 95% or greater sequence identity to the nucleotide sequence set forth in SEQ ID NO:105, SEQ ID NO:121, SEQ ID NO:124, SEQ ID NO:130, or SEQ ID NO:132.

72. An isolated nucleic acid comprising a nucleotide sequence encoding a polypeptide having 80% or greater sequence identity to the amino acid sequence set forth in SEQ ID NO:106, SEQ ID NO:122, SEQ ID NO:125, SEQ ID NO:131, or SEQ ID NO:133.

73.-76. (canceled)
